United States Patent Application Publication US 2007/0185017 A1 - sequence listing, part 2

SEQ ID NO: 1325 - DNA, 2229 bp, Homo sapien
ggcacgagggccaggaacgccagccgttcacgcgttcggtcctccttggctgactcaccgccctcgccgccgcaccatggacgcccccaggcaggtggtcaactttgggcctggtcccgccaagctgccgcactcagtgttgttagagatacaaaaggaattattagactacaaaggagttggcattagtgttcttgaaatgagtcacaggtcatcagattttgccaagattattaacaatacagagaatcttgtgcgggaattgctagctgttccagacaactataaggtgatttttctgcaaggaggtgggtgcggccagttcagtgctgtccccttaaacctcattggcttgaaagcaggaaggtgtgcggactatgtggtgacaggagcttggtcagctaaggccgcagaagaagccaagaagtttgggactataaatatcgttcaccctaaacttgggagttatacaaaaattccagatccaagcacctggaacctcaacccagatgcctcctacgtgtattattgcgcaaatgagacggtgcatggtgtggagtttgactttatacccgatgtcaagggagcagtactggtttgtgacatgtcctcaaacttcctgtccaagccagtggatgtttccaagtttggtgtgatttttgctggtgcccagaagaatgttggctctgctggggtcaccgtggtgattgtccgtgatgacctgctggggtttgccctccgagagtgcccctcggtcctggaatacaaggtgcaggctggaaacagctccttgtacaacacgcctccatgtttcagcatctacgtcatgggcttggttctggagtggattaaaaacaatggaggtgccgcggccatggagaagcttagctccatcaaatctcaaacaatttatgagattattgataattctcaaggattctacgtttgtccagtggagccccaaaatagaagcaagatgaatattccattccgcattggcaatgccaaaggagatgatgctttagaaaaaagatttcttgataaagctcttgaactcaatatgttgtccttgaaagggcataggtctgtgggaggcatccgggcctctctgtataatgctgtcacaattgaagacgttcagaagctggccgccttcatgaaaaaatttttggagatgcatcagctatgaacacatcctaaccaggatatactctgttcttgaacaacatacaaagtttaaagtaacttggggatggctacaaaaagttaacacagtatttttctcaaatgaacatgtttattgcagattcttcttttttgaaagaacaacagcaaaacatccacaactctgtaaagctggtgggacctaatgtcaccttaattctgacttgaactggaagcattttaagaaatcttgttgcttttctaacaaattcccgcgtattttgcctttgctgctactttttctagttagatttcaaacttgcctgtggacttaataatgcaagttgcgattaattatttctggagtcatgggaacacacagcacagagggtaggggggccctctaggtgctgaatctacacatctgtggggtctcctgggttcagcggctgttgattcaaggtcaacattgaccattggaggagtggtttaagagtgccaggcgaagggcaaactgtagatcgatctttatgctgttattacaggagaagtgacatactttatatatgtttatattagcaaggtctgtttttaataccatatactttatatttctatacatttatatttctaataatacagttatcactgatatatgtagacacttttagaatttattaaatccttgaccttgtgcattatagcattccattagcaagagttgtaccccctccccagtcttcgccttcctctttttaagctgttttatgaaaaagacctagaagttcttgattcatttttaccattctttccataggtagaagagaaagttgattggttggttgtttttcaattatgccattaaactaaacatttctgttaaattaccctatcctttgttctctactgttttctttgtaatgtatgactacgagagtgatactttgctgaaaagtctttcccctattgtttatctattgtcagtattttatgttgaatatgtaaagaacattaaagtcctaaaacatctaaaaaaaaaaaaaaaaaaaaaaaaaaaaaaaaaaa

SEQ ID NO: 1326 - protein, 370 aa, Homo sapien
MDAPRQVVNFGPGPAKLPHSVLLEIQKELLDYKGVGISVLEMSHRSSDFAKIINNTENLVRELLAVPDNYKVIFLQGGGCGQFSAVPLNLIGLKAGRCADYVVTGAWSAKAAEEAKKFGTINIVHPKLGSYTKIPDPSTWNLNPDASYVYYCANETVHGVEFDFIPDVKGAVLVCDMSSNFLSKPVDVSKFGVIFAGAQKNVGSAGVTVVIVRDDLLGFALRECPSVLEYKVQAGNSSLYNTPPCFSIYVMGLVLEWIKNNGGAAAMEKLSSIKSQTIYEIIDNSQGFYVCPVEPQNRSKMNIPFRIGNAKGDDALEKRFLDKALELNMLSLKGHRSVGGIRASLYNAVTIEDVQKLAAFMKKFLEMHQL

SEQ ID NO: 1327 - DNA, 2530 bp, Homo sapien
ctaaagtggagcccagcggcgggtgtgagagtccgtaaggagcagcttccaggatcctgagatccggagcagccggggtcggagcggctcctcaagagttactgatctatgaaatggcagagaatggaaaaaattgtgaccagagacgtgtagcaatgaacaaggaacatcataatggaaatttcacagacccctcttcagtgaatgaaaagaagaggagggagcgggaagaaaggcagaatattgtcctgtggagacagccgctcattaccttgcagtatttttctctggaaatccttgtaatcttgaaggaatggacctcaaaattatggcatcgtcaaagcattgtggtgtcttttttactgctgcttgctgtgcttatagctacgtattatgttgaaggagtgcatcaacagtatgtgcaacgtatagagaaacagtttcttttgtatgcctactggataggcttaggaattttgtcttctgttgggcttggaacagggctgcacacctttctgctttatctgggtccacatatagcctcagttacattagctgcttatgaatgcaattcagttaattttcccgaaccaccctatcctgatcagattatttgtccagatgaagagggcactgaaggaaccatttctttgtggagtatcatctcaaaagttaggattgaagcctgcatgtggggtatcggtacagcaatcggagagctgcctccatatttcatggccagagcagctcgcctctcaggtgctgaaccagatgatgaagagtatcaggaatttgaagagatgctggaacatgcagagtctgcacaagactttgcctcccgggccaaactggcagttcaaaaactagtacagaaagttggattttttggaattttggcctgtgcttcaattccaaatcctttatttgatctggctggaataacgtgtggacactttctggtacctttttggaccttctttggtgcaaccctaattggaaaagcaataataaaaatgcatatccagaaaatttttgttataataacattcagcaagcacatagtggagcaaatggtggctttcattggtgctgtccccggcataggtccatctctgcagaagccatttcaggagtacctggaggctcaacggcagaagcttcaccacaaaagcgaaatgggcacaccacagggagaaaactggttgtcctggatgtttgaaaagttggtcgttgtcatggtgtgttacttcatcctatctatcattaactccatggcacaaagttatgccaaacgaatccagcagcggttgaactcagaggagaaaactaaataagtagagaaagttttaaactgcagaaattggagtggatgggttctgccttaaattgggaggactccaagccgggaaggaaaattcccttttccaacctgtatcaatttttacaacttttttcctgaaagcagtttagtccatactttgcactgacatactttttccttctgtgctaaggtaaggtatccaccctcgatgcaatccaccttgtgttttcttagggtggaatgtgatgttcagcagcaaacttgcaacagactggccttctgtttgttactttcaaaaggcccacatgatacaattagagaattcccaccgcacaaaaaaagttcctaagtatgttaaatatgtcaagctttttaggcttgtcacaaatgattgctttgttttcctaagtcatcaaaatgtatataaattatctagattggataacagtcttgcatgtttatcatgttacaatttaatattccatcctgcccaacccttcctctcccatcctcaaaaaagggccattttatgatgcattgcacaccctctggggaaattgatctttaaattttgagacagtataaggaaaatctggttggtgtcttacaagtgagctgacaccattttttattctgtgtatttagaatgaagtcttgaaaaaaactttataaagacatctttaatcattccaaaattgtgtccgttttcttgagcgttttgattttttacttttagcttataccagctgaatggcagccttgcctaatccacctacaacaagaatttcttaagctttcttttatttgcatgagagagccactaccaaggcatgttttgttatgctgaaactgggctgctgcatactgctaaatggcacctctgggattggcctacctggggatttcttggtttgtgaaaacaggagaggagaaatatctcatacaagtgaaaggatactggagagagaaattacccatttctaaaaaaaaaccacactctgtcgtatctgtgttaatgttttctagcatgtactctggtttcaacagacacaaatttatatgttaacccagttttcttgccgttctgtaagtgttttattcttagtgtgatttttttccattgggatgtttttgattgaacttgttcattttgttttgcttgggaggaaaataaacaattttacttttttccttaaaaaaaaaaaaaaa

SEQ ID NO: 1328 - protein, 406 aa, Homo sapien
MAENGKNCDQRRVAMNKEHHNGNFTDPSSVNEKKRREREERQNIVLWRQPLITLQYFSLEILVILKEWTSKLWHRQSIVVSFLLLLAVLIATYYVEGVHQQYVQRIEKQFLLYAYWIGLGILSSVGLGTGLHTFLLYLGPHIASVTLAAYECNSVNFPEPPYPDQIICPDEEGTEGTISLWSIISKVRIEACMWGIGTAIGELPPYFMARAARLSGAEPDDEEYQEFEEMLEHAESAQDFASRAKLAVQKLVQKVGFFGILACASIPNPLFDLAGITCGHFLVPFWTFFGATLIGKAIIKMHIQKIFVIITFSKHIVEQMVAFIGAVPGIGPSLQKPFQEYLEAQRQKLHHKSEMGTPQGENWLSWMFEKLVVVMVCYFILSIINSMAQSYAKRIQQRLNSEEKTK

SEQ ID NO: 1329 - DNA, 1047 bp, Homo sapien
ctgtgagtgacacacgctgagtggggtgaagggaaatgctggtgaatttcattttgaggtgtgggttgctgttagtcactctgtctcttgccattgccaagcacaagcaatcttccttcaccaaaagttgttacccaaggggaacattgtcccaagctgttgacgctctctatatcaaagcagcatggctcaaagcaacgattccagaagaccgcataaaaaatatacgattattaaaaaagaaaacaaaaaagcagtttatgaaaaactgtcaatttcaagaacagcttctgtccttcttcatggaagacgtttttggtcaactgcaattgcaaggctgcaagaaaatacgctttgtggaggactttcatagccttaggcagaaattgagccactgtatttcctgtgcttcatcagctagagagatgaaatccattaccaggatgaaaagaatattttataggattggaaacaaaggaatctacaaagccatcagtgaactggatattcttctttcctggattaaaaaattattggaaagcagtcagtaaaccaaagccaagtacattgattttacagttattttgaaatacaataagaactgctagaaatatgtttataacagtctatttcttttaaaaactttttaacataatactgacggcatgttaggtgattcagaatagacaagaaggatttagtaaattaacgttttggatataagttgtcactaatttgcacattttctgtgttttcaaataatgtttccattctgaacatgttttgtcattcacaagtacattgtgtcaacttaatttaaagtatgtaacctgaattaactcgtgtaatatttgtgtgtggagtgggatgtggggggtggagggggaatgacagatttctggaatgcaatgtaatgttactgagacttaaatagatgttatgtatatgattgtctgtttaagtgtttgaaaattgttaattatgcccagtgtgaacttagtacttaacacattttgattttaattaaataaattgggtttccttctc

SEQ ID NO: 1330 - protein, 171 aa, Homo sapien
MLVNFILRCGLLLVTLSLAIAKHKQSSFTKSCYPRGTLSQAVDALYIKAAWLKATIPEDRIKNIRLLKKKTKKQFMKNCQFQEQLLSFFMEDVFGQLQLQGCKKIRFVEDFHSLRQKLSHCISCASSAREMKSITRMKRIFYRIGNKGIYKAISELDILLSWIKKLLESSQ

SEQ ID NO: 1331 - DNA, 690 bp, Homo sapien
tgcacaagcagaatcttcagaacaggttctccttccccagtcaccagttgctcgagttagaattgtctgcaatggccgccctgcagaaatctgtgagctctttccttatggggaccctggccaccagctgcctccttctcttggccctcttggtacagggaggagcagctgcgcccatcagctcccactgcaggcttgacaagtccaacttccagcagccctatatcaccaaccgcaccttcatgctggctaaggaggctagcttggctgataacaacacagacgttcgtctcattggggagaaactgttccacggagtcagtatgagtgagcgctgctatctgatgaagcaggtgctgaacttcacccttgaagaagtgctgttccctcaatctgataggttccagccttatatgcaggaggtggtgcccttcctggccaggctcagcaacaggctaagcacatgtcatattgaaggtgatgacctgcatatccagaggaatgtgcaaaagctgaaggacacagtgaaaaagcttggagagagtggagagatcaaagcaattggagaactggatttgctgtttatgtctctgagaaatgcctgcatttgaccagagcaaagctgaaaaatgaataactaaccccctttccctgctagaaataacaattagatgccccaaagcgattttt

SEQ ID NO: 1332 - protein, 179 aa, Homo sapien
MAALQKSVSSFLMGTLATSCLLLLALLVQGGAAAPISSHCRLDKSNFQQPYITNRTFMLAKEASLADNNTDVRLIGEKLFHGVSMSERCYLMKQVLNFTLEEVLFPQSDRFQPYMQEVVPFLARLSNRLSTCHIEGDDLHIQRNVQKLKDTVKKLGESGEIKAIGELDLLFMSLRNACI

SEQ ID NO: 1333 - DNA, 2023 bp, Homo sapien
tttacttcctgcgtccccggacgccgtatgtggaaaggcgaaccctgagtggaggatgttcccgctgcctaaagaatgattgactgtgactgcacttttgtgagattataaatataccacggagggtaacgaagctacagaagaatggaagaagacagcctggaagactcaaacctttttccaaaagtttggcattctgagatgacggtgtcagcgacaggcgaaccacctagtgccgtcgaagaagaaggaatacctaacgaaacagacatagaaatcatgccagaaatcccggaaactctagagccactgtcccttccagatgtgctgaggatctcggcagttctggaggacaccacagaccagctctttattctgaactacatcatgcccgttcagtacgatgggagacagagcatctgcgtgaaaagcagagaattgaatctagaaggaacgaatctagacaaacttgcaatgggcctcaacatgacaaaaatactcagtccgttactacctgtggaaggacccaatttgcctgatttcacacccagaggccggttcgctgtggagtttaacaaaatgcaggatcttgtcttcaaaaaacctacaaggcagaccatcatgactacggagacactgaagaaaattcacattgataggcagtttttcagcgatgtgattgcagataccattaaggagttgcaagattcggccacttacaacagtctcctgcaagctttgagcaaagagagggaaaacaaaatgcatttctatgacatcattgccagggaggaaaaaggaagaaaacagataatatcacttcaaaaacagctaattaatgtcaaaaaggaatggcaatttgaagtccagagtcagaatgagtatattgctaacctcaaggaccaactgcaagagatgaaggcaaaatccaacttggagaatcgctacatgaaaaccaataccgagctgcagattgcccagacccagaaaaagtgtaacagaacagaggaactcttggtggaagattttgagaaactcaggatgaaaaccgaagaagaggcccggactcatacagagattgaaatgttccttagaaaggagcagcagaaacttgaggagaggctggagttctggatggagaaatacgataaggacacagaaatgaaacagaatgaactaaatgctctcaaagccacaaaggccagtgtcttagcacaccttcaagacctggcaaagatgataagagagtatgaacaggtcatcattgaagatcgtatagaaaaggagaggagcaagaagaaggtaaaacaggatctcttggaattaaagagcgttataaagctccaggcctggtggcgaggcactatgatacggagagaaattggtggtttcaagatgcctaaagacaaagttgatagcaaggattcaaaaggcaaaggtaaaggcaaggataagaggagaggcaagaagaagtgaccaagttctcttttgtgttttctgctggtattctggaggtgggaaggacttggagagagttaagaaacacctggtacctcaaagatgactcatctacaggttgtttcctattgagactttcccagggaagcctgatttcactttgcctgttaatttcactctgcctgttaggtgggttttcaaaccctgatttaggattacaccattgacttagggcttcctcataccttgctgggaagaagtttctagtagtcctgtgaagattcattcttcttgctctttctcagcagaacaaaggagttcactggcttagctacagtgacgcattgaaacttgagtaattcctgtaatgtcagattttgattttacccaatttgtctgtagtgaaaaaactcttatgagcaaaagtattcagtaggaattacaatatgatgttattagctgtccagcataatatatacacagcaaagttttaataaatgttggttcctgcctgccttttaaaaaaaaaaaaaaaaaaaaaaaaaaaaaaaaaaaaaaaaaaaaa

SEQ ID NO: 1334 - protein, 443 aa, Homo sapien
MEEDSLEDSNLFPKVWHSEMTVSATGEPPSAVEEEGIPNETDIEIMPEIPETLEPLSLPDVLRISAVLEDTTDQLFILNYIMPVQYDGRQSICVKSRELNLEGTNLDKLAMGLNMTKILSPLLPVEGPNLPDFTPRGRFAVEFNKMQDLVFKKPTRQTIMTTETLKKIHIDRQFFSDVIADTIKELQDSATYNSLLQALSKERENKMHFYDIIAREEKGRKQIISLQKQLINVKKEWQFEVQSQNEYIANLKDQLQEMKAKSNLENRYMKTNTELQIAQTQKKCNRTEELLVEDFEKLRMKTEEEARTHTEIEMFLRKEQQKLEERLEFWMEKYDKDTEMKQNELNALKATKASVLAHLQDLAKMIREYEQVIIEDRIEKERSKKKVKQDLLELKSVIKLQAWWRGTMIRREIGGFKMPKDKVDSKDSKGKGKGKDKRRGKKK

SEQ ID NO: 1335 - DNA, 2712 bp, Homo sapien
gtcatgttcttcgcgccctggtgtggacactgccagcggctgcagccgacttggaatgacctgggagacaaatacaacagcatggaagatgccaaagtctatgtggctaaagtggactgcacggcccactccgacgtgtgctccgcccagggggtgcgaggataccccaccttaaagcttttcaagccaggccaagaagctgtgaagtaccagggtcctcgggacttccagacactggaaaactggatgctgcagacactgaacgaggagccagtgacaccagagccggaagtggaaccgcccagtgcccccgagctcaagcaagggctgtatgagctctcagcaagcaactttgagctgcacgttgcacaaggcgaccactttatcaagttcttcgctccgtggtgtggtcactgcaaagccctggctccaacctgggagcagctggctctgggccttgaacattccgaaactgtcaagattggcaaggttgattgtacacagcactatgaactctgctccggaaaccaggttcgtggctatcccactcttctctggttccgagatgggaaaaaggtggatcagtacaagggaaagcgggatttggagtcactgagggagtacgtggagtcgcagctgcagcgcacagagactggagcgacggagaccgtcacgccctcagaggccccggtgctggcagctgagcccgaggctgacaagggcactgtgttggcactcactgaaaataacttcgatgacaccattgcagaaggaataaccttcatcaagttttatgctccatggtgtggtcattgtaagactctggctcctacttgggaggaactctctaaaaaggaattccctggtctggcgggggtcaagatcgccgaagtagactgcactgctgaacggaatatctgcagcaagtattcggtacgaggctaccccacgttattgcttttccgaggagggaagaaagtcagtgagcacagtggaggcagagaccttgactcgttacaccgctttgtcctgagccaagcgaaagacgaactttaggaacacagttggaggtcacctctcctgcccagctcccgcaccctgcgtttaggagttcagtcccacagaggccactgggttcccagtggtggctgttcagaaagcagaacatactaagcgtgaggtatcttctttgtgtgtgtgttttccaagccaacacactctacagattctttattaaatgtgtaactcatggtcactgtgtaaacattttcagtggcgatatatcccctttgaccttctcttgatgaaatttacatggtttcctttgagactaaaatagcgttgagggaaatgaaattgctggactatttgtggctcctgagttgagtgattttggtgaaagaaagcacatccaaagcatagtttacctgcccacgagttctggaaaggtggccttgtggcagtattgacgttcctctgatcttaaggtcacagttgactcaatactgtgttggtccgtagcatggagcagattgaaatgcaaaaacccacacctctggaagataccttcacggccgctgctggagcttctgttgctgtgaatacttctctcagtgtgagaggttagccgtgatgaaagcagcgttacttctgaccgtgcctgagtaagagaatgctgatgccataactttatgtgtcgatacttgtcaaatcagttactgttcaggggatccttctgtttctcacggggtgaaacatgtctttagttcctcatgttaacacgaagccagagcccacatgaactgttggatgtcttccttagaaagggtaggcatggaaaattccacgaggctcattctcagtatctcattaactcattgaaagattccagttgtatttgtcacctggggtgacaagaccagacaggctttcccaggcctgggtatccagggaggctctgcagccctgctgaagggccctaactagagttctagagtttctgattctgtttctcagtagtccttttagaggcttgctatacttggtctgcttcaaggaggtcgaccttctaatgtatgaagaatgggatgcatttgatctcaagaccaaagacagatgtcagtgggctgctctggccctggtgtgcacggctgtggcagctgttgatgccagtgtcctctaactcatgctgtccttgtgattaaacacctctatctcccttgggaataagcacatacaggcttaagctctaagatagataggtgtttgtccttttaccatcgagctacttcccataataaccactttgcatccaacactcttcacccacctcccatacgcaaggggatgtggatacttggcccaaagtaactggtggtaggaatcttagaaacaagaccacttatactgtctgtctgaggcagaagataacagcagcatctcgaccagcctctgccttaaaggaaatctttattaatcacgtatggttcacagataattctttttttaaaaaaacccaacctcctagagaagcacaactgtcaagagtcttgtacacacaacttcagctttgcatcacgagtcttgtattccaagaaaatcaaagtggtacaatttgtttgtttacactatgatactttctaaataaactctttttttttaaaaaaaaaaaaaaaaaaaaaaaaaaaaaaaaaaaaaaaaaaaaaaaaaaac

SEQ ID NO: 1336 - protein, 324 aa, Homo sapien
MEDAKVYVAKVDCTAHSDVCSAQGVRGYPTLKLFKPGQEAVKYQGPRDFQTLENWMLQTLNEEPVTPEPEVEPPSAPELKQGLYELSASNFELHVAQGDHFIKFFAPWCGHCKALAPTWEQLALGLEHSETVKIGKVDCTQHYELCSGNQVRGYPTLLWFRDGKKVDQYKGKRDLESLREYVESQLQRTETGATETVTPSEAPVLAAEPEADKGTVLALTENNFDDTIAEGITFIKFYAPWCGHCKTLAPTWEELSKKEFPGLAGVKIAEVDCTAERNICSKYSVRGYPTLLLFRGGKKVSEHSGGRDLDSLHRFVLSQAKDEL

SEQ ID NO: 1337 - DNA, 1313 bp, Homo sapien
gtcaagatggcgggagcagctacccaggcttccctggagtcggccccacggatcatgcggctggtggccgaatgcagccgctccagggcccgggcaggcgagctgtggctgccgcatgggacagtggccactcctgtgttcatgccagtgggcacgcaggccaccatgaagggcatcacgaccgaacagctggacgctctgggttgccgcatctgcctgggcaatacctaccatctgggtctaaggccgggacccgagctgatccagaaagccaacggtctccacggcttcatgaattggcctcataatctgctaacggacagcggcggtttccagatggtgtcgctggtgtctctgtccgaggtgacggaggagggcgtccgcttccgctccccctacgacggcaatgagaccctgctgagcccggagaaatccgtgcagatccagaatgcgctgggctcggacatcatcatgcagctggacgacgtggttagcagtactgtgactgggccacgtgtggaggaggccatgtacaggtcaatccgctggctggaccggtgcattgcagcccatcagcggccggacaagcagaacctcttcgccattatccagggtgggctggacgcagatctccgggccacctgccttgaagagatgaccaagcgagacgtgcctggcttcgccatcgggggcctgagcgggggtgagagcaagtcgcagttctggcggatggtggcgctgagcacctctcggctgccgaaggacaagccccgatatctgatgggggttggctatgccactgatctggtagtctgcgtggctcttggatgtgacatgttcgactgcgtcttccccacacggacagcgcgctttggctctgccctggtgcccactgggaacctgcagttgaggaagaaggtgtttgagaaggacttcggccccatagacccggagtgcacctgccccacgtgccaaaagcacagccgcgccttcctgcacgcactgctgcacagtgacaacacggccgcgctgcaccacctcacggtccacaacatcgcctaccagctgcagctcatgagcgccgtccgcaccagcatcgtggagaagcgcttcccggacttcgtgcgggacttcatgggcgccatgtacggggatcccaccctctgtcccacctgggccactgacgctctggcctctgtgggaatcacacttggctgacctggcattgggagagggagggaggaaggaagggagggaggggctggaagatactgaaggattcctttttgaaaggtttttttttattgtaactt

SEQ ID NO: 1338 - protein, 403 aa, Homo sapien
MAGAATQASLESAPRIMRLVAECSRSRARAGELWLPHGTVATPVFMPVGTQATMKGITTEQLDALGCRICLGNTYHLGLRPGPELIQKANGLHGFMNWPHNLLTDSGGFQMVSLVSLSEVTEEGVRFRSPYDGNETLLSPEKSVQIQNALGSDIIMQLDDVVSSTVTGPRVEEAMYRSIRWLDRCIAAHQRPDKQNLFAIIQGGLDADLRATCLEEMTKRDVPGFAIGGLSGGESKSQFWRMVALSTSRLPKDKPRYLMGVGYATDLVVCVALGCDMFDCVFPTRTARFGSALVPTGNLQLRKKVFEKDFGPIDPECTCPTCQKHSRAFLHALLHSDNTAALHHLTVHNIAYQLQLMSAVRTSIVEKRFPDFVRDFMGAMYGDPTLCPTWATDALASVGITLG

SEQ ID NO: 1339 - DNA, 1897 bp, Homo sapien
atggccctgcgcaaggaactgctcaagtccatctggtacgcctttaccgcgctggacgtggagaagagtggcaaagtctccaagtcccagctcaaggtgctgtcccacaacctgtacacggtcctgcacatcccccatgaccccgtggccctggaggaacacttccgagatgatgatgacggccctgtgtccagccagggatacatgccctacctcaacaagtacatcctggacaaggtggaggagggggcttttgttaaagagcactttgatgagctgtgctggacgctgacggccaagaagaactatcgggcagatagcaacgggaacagtatgctctccaatcaggatgccttccgcctctggtgcctcttcaacttcctgtctgaggacaagtaccctctgatcatggttcctgatgaggtggaatacctgctgaaaaaggtactcagcagcatgagcttggaggtgagcttgggtgagctggaggagcttctggcccaggaggcccaggtggcccagaccaccggggggctcagcgtctggcagttcctggagctcttcaattcgggccgctgcctgcggggcgtgggccgggacaccctcagcatggccatccacgaggtctaccaggagctcatccaagatgtcctgaagcagggctacctgtggaagcgagggcacctgagaaggaactgggccgaacgctggttccagctgcagcccagctgcctctgctactttgggagtgaagagtgcaaagagaaaaggggcattatcccgctggatgcacactgctgcgtggaggtgctgccagaccgcgacggaaagcgctgcatgttctgtgtgaagacagccaaccgcacgtatgagatgagcgcctcagacacgcgccagcgccaggagtggacagctgccatccagatggcgatccggctgcaggccgaggggaagacgtccctacacaaggacctgaagcagaaacggcgcgagcagcgggagcagcgggagcggcgccgggcggccaaggaagaggagctgctgcggctgcagcagctgcaggaggagaaggagcggaagctgcaggagctggagctgctgcaggaggcgcagcggcaggccgagcggctgctgcaggaggaggaggaacggcgccgcagccagcaccgcgagctgcagcaggcgctcgagggccaactgcgcgaggcggagcaggcccgggcctccatgcaggctgagatggagctgaaggaggaggaggctgcccggcagcggcagcgcatcaaggagctggaggagatgcagcagcggttgcaggaggccctgcaactagaggtgaaagctcggcgagatgaagaatctgtgcgaatcgctcagaccagactgctggaagaggaggaagagaagctgaagcagttgatgcagctgaaggaggagcaggagcgctacatcgaacgggcgcagcaggagaaggaagagctgcagcaggagatggcacagcagagccgctccctgcagcaggcccagcagcagctggaggaggtgcggcagaaccggcagagggctgacgaggatgtggaggctgcccagagaaaactgcgccaggccagcaccaacgtgaaacactggaatgtccagatgaaccggctgatgcatccaattgagcctggagataagcgtccggtcaccagcagctccttctcaggcttccagccccctctgcttgcccaccgtgactcctccctaaagcgcctgacccgctggggatcccagggcaacaggaccccctcgcccaacagcaatgagcagcagaagtccctcaatggtggggatgaggctcctgccccggcttccacccctcaggaagataaactggatccagcaccagaaaattaga

SEQ ID NO: 1340 - protein, 631 aa, Homo sapien
MALRKELLKSIWYAFTALDVEKSGKVSKSQLKVLSHNLYTVLHIPHDPVALEEHFRDDDDGPVSSQGYMPYLNKYILDKVEEGAFVKEHFDELCWTLTAKKNYRADSNGNSMLSNQDAFRLWCLFNFLSEDKYPLIMVPDEVEYLLKKVLSSMSLEVSLGELEELLAQEAQVAQTTGGLSVWQFLELFNSGRCLRGVGRDTLSMAIHEVYQELIQDVLKQGYLWKRGHLRRNWAERWFQLQPSCLCYFGSEECKEKRGIIPLDAHCCVEVLPDRDGKRCMFCVKTANRTYEMSASDTRQRQEWTAAIQMAIRLQAEGKTSLHKDLKQKRREQREQRERRRAAKEEELLRLQQLQEEKERKLQELELLQEAQRQAERLLQEEEERRRSQHRELQQALEGQLREAEQARASMQAEMELKEEEAARQRQRIKELEEMQQRLQEALQLEVKARRDEESVRIAQTRLLEEEEEKLKQLMQLKEEQERYIERAQQEKEELQQEMAQQSRSLQQAQQQLEEVRQNRQRADEDVEAAQRKLRQASTNVKHWNVQMNRLMHPIEPGDKRPVTSSSFSGFQPPLLAHRDSSLKRLTRWGSQGNRTPSPNSNEQQKSLNGGDEAPAPASTPQEDKLDPAPEN

SEQ ID NO: 1341 - DNA, 2025 bp, Homo sapien
cttctgtgtgtgcacatgtgtaatacatatctgggatcaaagctatctatataaagtccttgattctgtgtgggttcaaacacatttcaaagcttcaggatcctgaaaggttttgctctacttcctgaagacctgaacaccgctcccataaagccatggcttgccttggatttcagcggcacaaggctcagctgaacctggctaccaggacctggccctgcactctcctgttttttcttctcttcatccctgtcttctgcaaagcaatgcacgtggcccagcctgctgtggtactggccagcagccgaggcatcgccagctttgtgtgtgagtatgcatctccaggcaaagccactgaggtccgggtgacagtgcttcggcaggctgacagccaggtgactgaagtctgtgcggcaacctacatgatggggaatgagttgaccttcctagatgattccatctgcacgggcacctccagtggaaatcaagtgaacctcactatccaaggactgagggccatggacacgggactctacatctgcaaggtggagctcatgtacccaccgccatactacctgggcataggcaacggaacccagatttatgtaattgatccagaaccgtgcccagattctgacttcctcctctggatccttgcagcagttagttcggggttgtttttttatagctttctcctcacagctgtttctttgagcaaaatgctaaagaaaagaagccctcttacaacaggggtctatgtgaaaatgcccccaacagagccagaatgtgaaaagcaatttcagccttattttattcccatcaattgagaaaccattatgaagaagagagtccatatttcaatttccaagagctgaggcaattctaacttttttgctatccagctatttttatttgtttgtgcatttggggggaattcatctctctttaatataaagttggatgcggaacccaaattacgtgtactacaatttaaagcaaaggagtagaaagacagagctgggatgtttctgtcacatcagctccactttcagtgaaagcatcacttgggattaatatggggatgcagcattatgatgtgggtcaaggaattaagttagggaatggcacagcccaaagaaggaaaaggcagggagcgagggagaagactatattgtacacaccttatatttacgtatgagacgtttatagccgaaatgatcttttcaagttaaattttatgccttttatttcttaaacaaatgtatgattacatcaaggcttcaaaaatactcacatggctatgttttagccagtgatgctaaaggttgtattgcatatatacatatatatatatatatatatatatatatatatatatatatatatatattttaatttgatagtattgtgcatagagccacgtatgtttttgtgtatttgttaatggtttgaatataaacactatatggcagtgtctttccaccttgggtcccagggaagttttgtggaggagctcaggacactaatacaccaggtagaacacaaggtcatttgctaactagcttggaaactggatgaggtcatagcagtgcttgattgcgtggaattgtgctgagttggtgttgacatgtgctttggggcttttacaccagttcctttcaatggtttgcaaggaagccacagctggtggtatctgagttgacttgacagaacactgtcttgaagacaatggcttactccaggagacccacaggtatgaccttctaggaagctccagttcgatgggcccaattcttacaaacatgtggttaatgccatggacagaagaaggcagcaggtggcagaatggggtgcatgaaggtttctgaaaattaacactgcttgtgtttttaactcaatattttccatgaaaatgcaacaacatgtataatatttttaattaaataaaaatctgtggtggtcgttttaaaaaaaaaaaaaaaaaaaaaaaaaaaaaaaaaaaaaaaaaaaaaaaaaaaaaaaaaa

SEQ ID NO: 1342 - protein, 223 aa, Homo sapien
MACLGFQRHKAQLNLATRTWPCTLLFFLLFIPVFCKAMHVAQPAVVLASSRGIASFVCEYASPGKATEVRVTVLRQADSQVTEVCAATYMMGNELTFLDDSICTGTSSGNQVNLTIQGLRAMDTGLYICKVELMYPPPYYLGIGNGTQIYVIDPEPCPDSDFLLWILAAVSSGLFFYSFLLTAVSLSKMLKKRSPLTTGVYVKMPPTEPECEKQFQPYFIPIN

SEQ ID NO: 1343 - DNA, 330 bp, Homo sapien
atggcggcctcagcagcgcgaggtgctgcggcgctgcgtagaagtatcaatcagccggttgcttttgtgagaagaattccttggactgcggcgtcgagtcagctgaaagaacactttgcacagttcggccatgtcagaaggtgcattttaccttttgacaaggagactggctttcacagaggtttgggttgggttcagttttcttcagaagaaggacttcggaatgcactacaacaggaaaatcatattatagatggagtaaaggtccaggttcacactagaaggccaaaacttccgcaaacatctgatgatgaaaagaaagatttttga

SEQ ID NO: 1344 - protein, 109 aa, Homo sapien
MAASAARGAAALRRSINQPVAFVRRIPWTAASSQLKEHFAQFGHVRRCILPFDKETGFHRGLGWVQFSSEEGLRNALQQENHIIDGVKVQVHTRRPKLPQTSDDEKKDF

SEQ ID NO: 1345 - DNA, 891 bp, Homo sapien
cctgggccagcatggcggcgcccatgtaacccggtccgtgccgcaaagcgaacggcggccgcggcgcgggccccgcgggggttagaggtcaccatgctgagggtcgcgtggaggacgctgagtttgattcggacccgggcagttacccaggtcctagtacccgggctgccgggcggtgggagcgccaagtttcctttcaaccagtggggcctgcagcctcgaagtctcctcctccaggccgcgcgcggatatgtcgtccggaaaccagcccagtctaggctggatgatgacccacctccttctacgctgctcaaagactaccagaatgtccctggaattgagaaggttgatgatgtcgtgaaaagactcttgtctttggaaatggccaacaagaaggagatgctaaaaatcaagcaagaacagtttatgaagaagattgttgcaaacccagaggacaccagatccctggaggctcgaattattgccttgtctgtcaagatccgcagttatgaagaacacttggagaaacatcgaaaggacaaagcccacaaacgctatctgctaatgagcattgaccagaggaaaaagatgctcaaaaacctccgtaacaccaactatgatgtctttgagaagatatgctgggggctgggaattgagtacaccttcccccctctgtattaccgaagagcccaccgccgattcgtgaccaagaaggctctgtgcattcgggttttccaggagactcaaaagctgaagaagcgaagaagagccttaaaggctgcagcagcagcccaaaaacaagcaaagcggaggaacccagacagccctgccaaagccataccaaagacactcaaagacagccaataaattctgttcaatcattaaaaaaaa

SEQ ID NO: 1346 - protein, 257 aa, Homo sapien
MLRVAWRTLSLIRTRAVTQVLVPGLPGGGSAKFPFNQWGLQPRSLLLQAARGYVVRKPAQSRLDDDPPPSTLLKDYQNVPGIEKVDDVVKRLLSLEMANKKEMLKIKQEQFMKKIVANPEDTRSLEARIIALSVKIRSYEEHLEKHRKDKAHKRYLLMSIDQRKKMLKNLRNTNYDVFEKICWGLGIEYTFPPLYYRRAHRRFVTKKALCIRVFQETQKLKKRRRALKAAAAAQKQAKRRNPDSPAKAIPKTLKDSQ

SEQ ID NO: 1347 - DNA, 360 bp, Homo sapien
atggcaggcctgatgaccatagtaaccagccttctgttccttggtgtctgtgcccaccacatcatccctacgggctctgtggtcatcccctctccctgctgcatgttctttgtttccaagagaattcctgagaaccgagtggtcagctaccagctgtccagcaggagcacatgcctcaaggcaggagtgatcttcaccaccaagaagggccagcagttctgtggcgaccccaagcaggagtgggtccagaggtacatgaagaacctggacgccaagcagaagaaggcttcccctagggccagggcagtggctgtcaagggccctgtccagagatatcctggcaaccaaaccacctgctaa

SEQ ID NO: 1348 - protein, 119 aa, Homo sapien
MAGLMTIVTSLLFLGVCAHHIIPTGSVVIPSPCCMFFVSKRIPENRVVSYQLSSRSTCLKAGVIFTTKKGQQFCGDPKQEWVQRYMKNLDAKQKKASPRARAVAVKGPVQRYPGNQTTC

SEQ ID NO: 1349 - DNA, 4312 bp, Homo sapien
gggggcagaaaagggggcggcggactcggcttgttgtgttgctgcctgagtgccggagacggtcctgctgctgccgcagtcctgccagctgtccgacgatgtcgtcccacctagtcgagccgccgccgcccctgcacaacaataacaacaactgcgaggaaaatgagcagtctctgcccccgccggccggcctcaacagttcctgggtggagctacccatgaacagcagcaatggcaatgataatggcaatgggaaaaatggggggctggaacacgtaccatcctcatcctccatccacaatggagacatggagaagattcttttggatgcacaacatgaatcaggacagagtagttccagaggcagttctcactgtgacagcccttcgccacaagaagatgggcagatcatgtttgatgtggaaatgcacaccagcagggaccatagctctcagtcagaagaagaagttgtagaaggagagaaggaagtcgaggctttgaagaaaagtgcggactgggtatcagactggtccagtagacccgaaaacattccacccaaggagttccacttcagacaccctaaacgttctgtgtctttaagcatgaggaaaagtggagccatgaagaaagggggtattttctccgcagaatttctgaaggtgttcattccatctctcttcctttctcatgttttggctttggggctaggcatctatattggaaagcgactgagcacaccctctgccagcacctactgagggaaaggaaaagcccctggaaatgcgtgtgacctgtgaagtggtgtattgtcacagtagcttatttgaacttgagaccattgtaagcatgacccaacctaccaccctgtttttacatatccaattccagtaactctcaaattcaatattttattcaaactctgttgaggcattttactaaccttataccctttttggcctgaagacattttagaatttcctaacagagtttactgttgtttagaaatttgcaagggcttcttttccgcaaatgccaccagcagattataattttgtcagcaatgctattatctctaattagtgccaccagactagacctgtatcattcatggtataaattttactcttgcaacataactaccatctctctcttaaaacgagatcaggttagcaaatgatgtaaaagaagctttattgtctagttgttttttttcccccaagacaaaggcaagtttccctaagtttgagttgatagttattaaaaagaaaacaaaacaaaaaaaaaaggcaaggcacaacaaaaaaatatcctgggcaataaaaaaaatattttaaaccagctttggagccacttttttgtctaagcctcctaatagcgtcttttaatttataggaggcaaactgtataaatgataggtatgaaatagaataagaagtaaaatacatcagcagattttcatactagtatgttgtaatgctgtcttttctatggtgtagaatctttctttctgataaggaacgtctcaggcttagaaatatatgaaattgctttttgagatttttgcgtgtgtgtttgatattttttacgataattagctgcatgtgaatttttcatgaccttctttacattttttattttttatttctttatttttttttctctaagaagaggctttggaatgagttccaatttgtgatgttaatacaggcttcttgttttaggaagcatcacctatactctgaagcctttaaactctgaagagaattgtttcagagttattccaagcacttgtgcaacttggaaaaacagacttgggttgtgggaacagttgacagcgttctgaaaagatgccatttgtttccttctgatctctcactgaataatgtttactgtacagtcttcccaaggtgattcctgcgactgcaggcactggtcattttctcatgtagctgtcttttcagttatggtaaactcttaaagttcagaacactcaacagattccttcagtgatatacttgttcgttcatttctaaaatgtgaagctttaggaccaaattgttagaaagcatcaggatgaccagttatctcgagtagattttcttggatttcagaacatctagcatgactctgaaggataccacatgttttatatataaataattactgtttatgatatagacattgatattgactatttagagaaccgttgttaattttaaaactagcaatctataaagtgcaccaggtcaacttgaataaaaacactatgacagacaggtttgccagtttgcagaaactaactcttttctcacatcaacatttgtaaaattgatgtgttatagtggaaaataacatatagattaaacaaaatttttatcttttttcaagaatatagctggctatctttaagaaagatgatatatcctagttttgaaagtaattttcttttttctttctagcatttgatgtctaaataattttggacatctttttcctagaccatgtttctgtcttactcttaaacctggtaacacttgatttgccttctataacctatttatttcaagtgttcatatttgaatttctttgggaagaaagtaaatctgatggctcactgatttttgaaaagcctgaataaaattggaaagactggaaagttaggagaactgactagctaaactgctacagtatgcaatttctattacaattggtattacaggggggaaaagtaaaattacactttacctgaaagtgacttcttacagctagtgcattgtgctctttccaagttcagcagcagttctatcagtggtgccactgaaactgggtatatttatgatttctttcagcgttaaaaagaaacatagtgttgccctttttcttaaagcatcagtgaaattatggaaaattacttaaaacgtgaatacatcatcacagtagaatttattatgagagcatgtagtatgtatctgtagccctaacacatgggatgaacgttttactgctacacccagatttgtgttgaacgaaaacattgtggtttggaaaggagaattcaacaattaatagttgaaattgtgaggttaatgtttaaaaagctttacacctgtttacaatttggggacaaaaaggcaggcttcatttttcatatgtttgatgaaaactggctcaagatgtttgtaaatagaatcaagagcaaaactgcacaaacttgcacattggaaagtgcaacaagttcccgtgattgcagtaaaaatatttactattctaaaaaaatgagaattgaagacttagccagtcagataagttttttcatgaacccgttgtggaaattattggaattaactgagccaaagtgattatgcattcttcatctattttagttagcactttgtatcgttatatacagtttacaatacatgtataacttgtagctataaacattttgtgccattaaagctctcacaaaacttttcctgtcagtatatcatttttctgtcgcacctgttgcctgggagtttcaggcgatgaggcctcctcgcctacacacagccttccagtcatctggcttccccagcagtggagttcctaacagtgctcagggtgtgaacggtgttctgtggggacagtcaccgcagtgtgagcattcgtgagtgcctcgggactgtggcattcagagcatttgcctccaggtagtggcaggagggcgctcacgggaggagtgctcaggaagtacaggagagaagaagagtgtgccctgatggaaatgacagtgggacaccagtgaaagtggatccagaaggaactggaagttccacgtgcctggaaaacaggatggatacagaggaaactgaaaaatgtaggttagtactgaacctaattgaaatgtgtgtgccctcccaggggtcacacttcatcatatagttagctgggtttacttcttttaaaccaggaggtgatttaagatgtaaattttagacagtcaagccatctggtgagagagtaccagaggagatcaatcagttctctaggcgaggagctagggcctgtcctgggctgtcaccctgaggttggcagtggtgggccaggatacgtatgagaaacaaagcggaagtaaactggtcagaaagtgacttagagacgaaggcgtgtgtattcctttgtgtgtgtggcccgtaaaacatgggttgatcccattagttaaaggaggacaggagaagaaatggggtggtaggagcaaagagggaggatttcagttttgagtgcgttgaacatgaaatgtctgagggccttctgattggacacttactcc

SEQ ID NO: 1350 - protein, 251 aa, Homo sapien
GQKRGRRTRLVVLLPECRRRSCCCRSPASCPTMSSHLVEPPPPLHNNNNNCEENEQSLPPPAGLNSSWVELPMNSSNGNDNGNGKNGGLEHVPSSSSIHNGDMEKILLDAQHESGQSSSRGSSHCDSPSPQEDGQIMFDVEMHTSRDHSSQSEEEVVEGEKEVEALKKSADWVSDWSSRPENIPPKEFHFRHPKRSVSLSMRKSGAMKKGGIFSAEFLKVFIPSLFLSHVLALGLGIYIGKRLSTPSASTY

SEQ ID NO: 1351 - DNA, 1337 bp, Homo sapien
gcggcggactcggcttgttgtgttgctgcctgagtgccggagacggtcctgctgctgccgcagtcctgccagctgtccgacgatgtcgtcccacctagtcgagccgccgccgcccctgcacaacaacaacaacaactgcgaggaaaatgagcagtctctgcccccgccggccggcctcaacagttcctgggtggagctacccatgaacagcagcaatggcaatgataatggcaatgggaaaaatggggggctggaacacgtaccatcctcatcctccatccacaatggagacatggagaagattcttttggatgcacaacatgaatcaggacagagtagttccagaggcagttctcactgtgacagcccttcgccacaagaagatgggcagatcatgtttgatgtggaaatgcacaccagcagggaccatagctctcagtcagaagaagaagttgtagaaggagagaaggaagtcgaggctttgaagaaaagtgcggactgggtatcagactggtccagtagacccgaaaacattccacccaaggagttccacttcagacaccctaaacgttctgtgtctttaagcatgaggaaaagtggagccatgaagaaagggggtattttctccgcagaatttctgaaggtgttcattccatctctcttcctttctcatgttttggctttggggctaggcatctatattggaaagcgactgagcacaccctctgccagcacctactgagggaaaggaaaagcccctggaaatgcgtgtgacctgtgaagtggtgtattgtcacagtagcttatttgaacttgagaccattgtaagcatgacccaacctaccaccctgtttttacatatccaattccagtaaccctcaaattcaatattttattcaaactctgttgaggcattttactaaccttataccctttttggcctgaagacattttagaatttcctaacagagtttactgttgtttagaaatttgcaagggcttcttttccgcaaatgccaccagcagattataattttgtcggcaatgctattatctctaattagtgccaccagactagacctgtatcattcatggtataaattttactcttccaacataactaccatctctctcttaaaacgagatcaggttagcaaatgatgtaaaagaagctttattgtctagttgttttttttcccccaagacaaaggcaagtttccctaagtttgagttgatagttattaaaaagaaaacaaaacaaaaaaaaaaggcaaggcacaacaaaaaaatatcctgggcaataaaaaaaatattttaaaccaaaaaaaaaaaaaaaa

SEQ ID NO: 1352 - protein, 219 aa, Homo sapien
MSSHLVEPPPPLHNNNNNCEENEQSLPPPAGLNSSWVELPMNSSNGNDNGNGKNGGLEHVPSSSSIHNGDMEKILLDAQHESGQSSSRGSSHCDSPSPQEDGQIMFDVEMHTSRDHSSQSEEEVVEGEKEVEALKKSADWVSDWSSRPENIPPKEFHFRHPKRSVSLSMRKSGAMKKGGIFSAEFLKVFIPSLFLSHVLALGLGIYIGKRLSTPSASTY

SEQ ID NO: 1353 - DNA, 3459 bp, Homo sapien
  Unsure 1646-1667: Unknown base
gggtggagtgtaggccagggggttggcggtgccgtgtcatggaggctcagtctctgagcagccattgaaggggaaggaactgcgggtgtgtgtgtgtatgtgtgtgtgtatgtgtgtgcgcgcgtgcgtgcgtgtgtgtgcgcgcgctagtgtgtggacaaggaggtgggggcagctgagttagagtcccaactcttggactccatttgctattctcttctttctcccccacacctatctggtggtggtagtgggcgtttatatttgcgttccttttcattcatttctaaatctcttaaaaattttgggttgggggtattggggaaggcaggaaagggaaaaggagagtagtagctgaagagcaagaggaggacatggagatgaagaagaagattaacctggagttaaggaacagatccccggaggaggtgacagagttagtccttgataattgcctgtgtgtcaatggggaaattgaaggcctgaatgatactttcaaagaactagaatttctgagtatggctaatgtggaactaagttcgctggcccggcttcccagcttaaataaacttcgaaaattggagcttagtgataatataatttctggaggcttggaagtcctggcagagaaatgtccaaatcttacctacctcaatctgagtggaaacaaaataaaagatctcagtacagtagaagctctgcaaaatcttaaaaatttgaaaagtcttgacctgtttaactgtgagatcacaaacctggaagattatagagaaagtatttttgaactactgcagcaaatcacatacttagatggatttgatcaggaggataatgaagcgccggactctgaagaggaggatgatgaggatggcgatgaagatgatgaagaggaagaggaaaatgaagctggtccaccggaaggatatgaggaagaggaggaggaagaggaagaggaggatgaggatgaggatgaagatgaagatgaagcaggttcagagttgggagagggagaagaggaagtgggcctctcatacttaatgaaagaagaaattcaggatgaagaagattatgatgactatgttgaagaaggggaagaagaggaagaagaggaagaaggaggtcttcgaggggagaagaggaaacgagatgctgaagacgatggagaggaagaagatgactagatcattctaagaccagattctctaatgtttctgggtgtgcaatagagtgatcacatctttgtttcttcatgtacgatagctatccctacagaagataatgtgtaactttttataggaaaagtgtggttttactatttttgccttatcattccaaataagaactagtctgttaatgatcatattgtatgtagagaaaaattttcattgactcccattgtggaattccctagcaatttatttagacttaattttttaaattcaagcttactgtattagtcatttttagcccataattaaaacatgatcacttttacacaggtgtagtatggtgcatttcattccttatttataaattaactgaaattacagtttgctataatataaaatgacaatagtctcttgagtggtaagttggttatttttttagaggtgatccaggaatctttagtttgaaggcagttaccnnnnnnnnnnnnnnnnnnnnnngactaagagtgtttggttgcttttttgtcacaagtaacttggaaaatagaagcagaatagtaaaggttctattcagcaacatagttcatggattttgtggaggttctattcagtaatatggttcatggatttagtggtgactgataagattttatttttgaaggaaaaattgcttatactaagtccagagacatgcaggtgagcccttttgtcaggctgcaaatcatgacatgccgatggttgtttattttgtttttaggtgtgcattctttttcttcttagcaattcctttatgatcaccttcccttcttgtttcactccctcccgctctctcaaaaggaacttgggaaacttgtgaaacccaggaaaacctttagtcttatacctcaactacctttcagtcctgtctgggttttaaataagtgaagtagaagaaattgagtattttctgacataagaatatattatcaatacagttttatgcagtaagctctccttaccataaatgtttcttggttgacaacatctaagacaatattagtgggatgaagaaagaaaagcaggggtgcttttggaagcagtgttagtgttcctcaaaagtcggaacaattgcctgttgatatattaataagacattaaagtcaaattttaatgttggcctctcaaatgatttggataccactctgcaaagtatttctaacctttaattcccagttttaaaacagatataataatagcatttaattggaatatactaggcagctggaaaagtatttgaaactaaattgacattaaaattaagatttgttttcaagtggatgtccattaaaagtagaaaaatatttgggataagtgagtgtgtgtttccttacatggctactaaataaaatataatgagtatacaagtatatctcctcttttgctatggaggctccatgttcaaggcaatggctttttaaatcttggctatctaaaattttttccctttgttttgaatatttgtaagtttttaagaagttagtgtcagcaaattaattgaagttatgcttctatactgggacatatttaaatactgagtatagtactgctgctactgcttctacaatgtaaaatgtatgacttggtgttttaaagtaaaaattatgatgttacttgtggagaaactaaaaatgttgtacaactgaccgaaagaaaacccttggggataagtttagtgaggggattggaatccccaaaaagataacatttttcttctgcttttaaaaactgaaattccctgttctagttcctaacaattctcattacatactatgccagattacaaaatacttatttttaaaatgaaatctatatattgactttcttatcaatcatcttactgtgcaatcaaaattagagtactttggtttgaaaacaacacttagagcctccagataacttttaagacttatttagctttgtgggtggtattttcatgcaaataagtaagggtgggttttatattttgtagaagttttcggtcctattttaatgctctttgtatggcagtatgtatatattgtgttaagttcctcaagaatctccttaaaaactttgaagttaatacttttgtgcaactgtgttttgaataaagccatgacagtgttaaaaacaaacaaaaaaatttgcagtactcctgattattcttttattgtttttgactgttccctgtttttttctgtgactgctgtaacttaaagtttttgaaactgaattgcttcaaataaattgaagatttgttataatgattaac

SEQ ID NO: 1354 - protein, 268 aa, Homo sapien
MEMKKKINLELRNRSPEEVTELVLDNCLCVNGEIEGLNDTFKELEFLSMANVELSSLARLPSLNKLRKLELSDNIISGGLEVLAEKCPNLTYLNLSGNKIKDLSTVEALQNLKNLKSLDLFNCEITNLEDYRESIFELLQQITYLDGFDQEDNEAPDSEEEDDEDGDEDDEEEEENEAGPPEGYEEEEEEEEEEDEDEDEDEDEAGSELGEGEEEVGLSYLMKEEIQDEEDYDDYVEEGEEEEEEEEGGLRGEKRKRDAEDDGEEEDD

SEQ ID NO: 1355 - DNA, 4438 bp, Homo sapien
  Unsure 312: Unknown base
  Unsure 3415: Unknown base
  Unsure 3451: Unknown base
  Unsure 3671: Unknown base
  Unsure 3880: Unknown base
gcggccgctgaattctagggcggagcgaagagaaccggtcgcggcaatcctagcgcgcagcagcagcagcagcagcagcacccgcatccgctgcgggagtccgagccggaaccacacccaagtagctgccctttcctcttctgtcatctcaccgccccaccacagaccgcgttccccgaggaaaccggccgcccacgcccggagcatcctcccctgttgagcgggcgctgacggacccggcggcatgatgcggctgcgaggctcggggatgctgcgggacctgctcctgcggtcgcccgccggcgtgagcgngactctgcggcgggcacagcccttggtcaccctgtgccggcgtccccgaggcgggggacggccggccgcgggcccggctgccgccgcgcgactccacccgtggtggggcgggggcggctggccggcggagcccctcgcgcggggcctgtccagctctccttcggagatcttgcaggagctgggcaaggggagcacgcatccccagcccggggtgtcgccacccgctgccccggcggcgcccggccccaaggacggccccggggagacggacgcgtttggcaacagcgagggcaaagagctggtggcctcaggtgaaaacaaaataaaacagggtctgttacctagcttggaagatttgctgttctatacaattgctgaaggacaagagaaaatacctgttcataaatttattacagcactcaaatctacaggattgcgaacgtctgatcccaggttgaaagagtgtatggatatgttaagattaactcttcaaacaacatcagatggtgtcatgctagacaaagatctttttaaaaaatgtgttcagagcaacattgttttgttgacacaagcatttagaagaaagtttgtgattcctgactttatgtcttttacctcacacattgatgagttatatgaaagtgctaaaaagcagtctggaggaaaggttgcagattatattcctcaactggccaaattcagtcccgatttgtggggtgtgtctgtttgtacagcagatggacagaggcattctactggagataccaaagttcccttctgtcttcagtcctgtgtaaaacctttgaaatatgccattgctgttaatgatcttggaactgaatatgtgcatcgatatgttggaaaagagccgagtggactaagattcaacaaactatttttgaatgaagatgataaaccacataatcctatggtaaatgctggagcaattgttgtgacttcactaataaagcaaggagtaaataatgctgaaaaatttgactatgtcatgcagtttttgaataagatggctggtaatgaatatgttggattcagtaatgcaacgtttcagtctgaaagagaaagtggagatcgaaattttgcaataggatattacttaaaagaaaagaagtgttttccagaaggcacagacatggttggtatattagacttctacttccagctgtgctccattgaagtgacttgtgaatcagccagtgtgatggctgcgacactggctaatggtggtttctgcccaattactggtgaaagagtactgagccctgaagcagttcgaaatacattgagtttgatgcattcctgtggcatgtatgacttctcagggcagtttgctttccatgttggtcttcctgcaaaatctggagttgctgggggcattcttttagttgtccccaatgttatgggtatgatgtgctggtctcctcctctggataagatgggcaacagtgttaagggaattcacttttgtcacgatcttgtttctctgtgtaatttccataactatgataatttgagacactttgcaaaaaaacttgatcctcgaagagaaggtggtgatcaaaggcattcctttggaccattggactatgaaagtctccaacaagaacttgctttaaaagagacagtatggaaaaaagtgtcacctgagtcaaatgaggacatctctacaactgtagtatatagaatggaaagtctgggagagaaaagctaaagaaatgggttctagtttcagaatgtttcttcatttaatctttcaaacatctttagcttttttttgcaagttataaatatttatttgaggtattttttgttctcaatcttgggtgctggagccataaagcttttttttccttttaatctttgtataaaggcagtagattaagaagtgcatttgttggtctttaaaaagtatttacaagtacataaatttgctttatttttaaaaatacaaaaaggaaaaatttaaattttttttgatgtaattaaaatgttaactatgtggtcagataatcccattttacaatagtaacagaaaattgtaattcttagttctaaaattcacaaattaaactcataagctttgttgcattttgttttttcttttccatttttaaaactaatgtgatgtctttagtggcaatagaaggtacttctatgctaaatacaaaactaaaaaggcaaaataatgaaccccaaattattttatttaaaatagcagtggattataaaattagcttgtgtttacatttatgccatttttggtgatagattggctttacattttaaaaaatttatttaaaaatttatcaaatgctttaaaatatgactcctactttttttattttgcaactcctctgttctgtcagagttgttatatacaggagtgtcttatgttactaaaacattccagccaaagaatttcagatgtgagataatgatgtttcatcaataaaaagctataatggttagttactcagaaggagaaacagtgagtgtcttcaagtgaattgttcacctaaacaattttattttcatattatccacataactttttctatgttatatttaaatatgaatggcaaattttggtttttagcttttacattttattatcttaattttataaatgctaatatttcttttgtgataagttatagcatctcataaagtttgttctatttgaagttttttagagtacttgagaaatgaatttagtctgcaggtagtaagtatgctactaaaatacgttagatctaaatccttttatttggtataaaaatgcaatattgagaatcaaaacttgtttttaagagaactatagattctacacaacctgatttcaagtaattattcatagtatttatagttgtcttggcaaagtgattgtaaaattctgtaggacctattcacacttcttccttcttccatatacttctctggttttccccatagttcccctataatttcaagtttgttgaaacctgttaattttagtgggggattagaagaaaaacttggtggtttcttagcatgatggtgtatgtatgtggtaatggaaagtctgtaaaagtaaatatagtgtagnaaaaaagatttcactgagtattttagatactagtgnaaataaagatagaaaatcttgatcataatgtcttaagtttgggaactgtgatattaagaaaagaaattcccttctagaggtgctggccaaaaagccttttgggctaacttaagtattaaatttatatatttaaataattatattttaagttgtagaggattttcccaaggattttatgcttacttgaatgttctttgaatgttcagatgcatatcctaanctggatgcttctcaaggccttactgcatatttgtgttgcatatttatgttagttgcaccagggccatttgtagtttgggcaaccgaatgccttaattggaaaaaaggcattgtggtttcccctattatctaaattgttacattttaccatttcattccgaagttggttttactttattaaatgaagatttagttttcatatcgtatacntagctgtatagatttcaaaattaggttgttaatttgtgtcacttactatttttgtgttggtaatgctttaaatgcatacttaaaaatgaagtactgttatctaagctactgtgtttagaaaatgttaagaatgagcagaaatttttatagaaaagataaacggaagaagagataagatactgcgaataggccctcaaacttaaaaaagaaaaaactttgccagttttaaggacatattttgattctttcagtatcttaacacctttttaaacaaagttcttgatagtaccactattattgggtttgttttatgccattattgattcttgatattcaagcatttacaatgtagcatatttgattttcttttttctttctttttttggcatgtttttagcataaatgttgcattttatcttagtgtttggatgaaaacatttgtgttgtttagctttcatttgctttgtatatttaataatgtacctttattttccagtatgcctacattttgtattgcacaataaatttattttaagctgaaaaaaaaaaaaaaaaaaa

SEQ ID NO: 1356 - protein, 598 aa, Homo sapien
  unsure 23: unknown amino acid
MMRLRGSGMLRDLLLRSPAGVSXTLRRAQPLVTLCRRPRGGGRPAAGPAAAARLHPWWGGGGWPAEPLARGLSSSPSEILQELGKGSTHPQPGVSPPAAPAAPGPKDGPGETDAFGNSEGKELVASGENKIKQGLLPSLEDLLFYTIAEGQEKIPVHKFITALKSTGLRTSDPRLKECMDMLRLTLQTTSDGVMLDKDLFKKCVQSNIVLLTQAFRRKFVIPDFMSFTSHIDELYESAKKQSGGKVADYIPQLAKFSPDLWGVSVCTADGQRHSTGDTKVPFCLQSCVKPLKYAIAVNDLGTEYVHRYVGKEPSGLRFNKLFLNEDDKPHNPMVNAGAIVVTSLIKQGVNNAEKFDYVMQFLNKMAGNEYVGFSNATFQSERESGDRNFAIGYYLKEKKCFPEGTDMVGILDFYFQLCSIEVTCESASVMAATLANGGFCPITGERVLSPEAVRNTLSLMHSCGMYDFSGQFAFHVGLPAKSGVAGGILLVVPNVMGMMCWSPPLDKMGNSVKGIHFCHDLVSLCNFHNYDNLRHFAKKLDPRREGGDQRHSFGPLDYESLQQELALKETVWKKVSPESNEDISTTVVYRMESLGEKS

SEQ ID NO: 1357 - DNA, 3084 bp, Homo sapien
aagatctaaaaacggacatctccaccgtgggtggctcctttttctttttctttttttcccacccttcaggaagtggacgtttcgttatcttctgatccttgcaccttcttttggggaaacggggcccttctgcccagatcccctctcttttctcggaaaacaaactactaagtcggcatccggggtaactacagtggagagggtttccgcggagacgcgccgccggaccctcctctgcactttggggaggcgtgctccctccagaaccggcgttctccgcgcgcaaatcccggcgacgcggggtcgcggggtggccgccggggcagcctcgtctagcgcgcgccgcgcagacgcccccggagtcgccagctaccgcagccctcgccgcccagtgcccttcggcctcggggcgggcgcctgcgtcggtctccgcgaagcgggaaagcgcggcggccgccgggattcgggcgccgcggcagctgctccggctgccggccggcggccccgcgctcgcccgccccgcttccgcccgctgtcctgctgcacgaacccttccaactctcctttcctcccccacccttgagttacccctctgtctttcctgctgttgcgcgggtgctcccacagcggagcggagattacagagccgccgggatgccccaactctccggaggaggtggcggcggcgggggggacccggaactctgcgccacggacgagatgatccccttcaaggacgagggcgatcctcagaaggaaaagatcttcgccgagatcagtcatcccgaagaggaaggcgatttagctgacatcaagtcttccttggtgaacgagtctgaaatcatcccggccagcaacggacacgaggtggccagacaagcacaaacctctcaggagccctaccacgacaaggccagagaacaccccgatgacggaaagcatccagatggaggcctctacaacaagggaccctcctactcgagttattccgggtacataatgatgccaaatatgaataacgacccatacatgtcaaatggatctctttctccacccatcccgagaacatcaaataaagtgcccgtggtgcagccatcccatgcggtccatcctctcacccccctcatcacttacagtgacgagcacttttctccaggatcacacccgtcacacatcccatcagatgtcaactccaaacaaggcatgtccagacatcctccagctcctgatatccctactttttatcccttgtctccgggtggtgttggacagatcaccccacctcttggctggcaaggtcagcctgtatatcccatcacgggtggattcaggcaaccctacccatcctcactgtcagtcgacacttccatgtccaggttttcccatcatatgattcccggtcctcctggtccccacacaactggcatccctcatccagctattgtaacacctcaggtcaaacaggaacatccccacactgacagtgacctaatgcacgtgaagcctcagcatgaacagagaaaggagcaggagccaaaaagacctcacattaagaagcctctgaatgcttttatgttatacatgaaagaaatgagagcgaatgtcgttgctgagtgtactctaaaagaaagtgcagctatcaaccagattcttggcagaaggtggcatgccctctcccgtgaagagcaggctaaatattatgaattagcacggaaagaaagacagctacatatgcagctttatccaggctggtctgcaagagacaattatggtaagaaaaagaagaggaagagagagaaactacaggaatctgcatcaggtacaggtccaagaatgacagctgcctacatctgaaacatggtggaaaacgaagctcattcccaacgtgcaaagccaaggcagcgaccccaggacctcttctggagatggaagcttgttgaaaacccagactgtctccacggcctgcccagtcgacgccaaaggaacactgacatcaattttaccctgaggtcactgctagagacgctgatccataaagacaatcactgccaacccctctttcgtctactgcaagagccaagttccaaaataaagcataaaaaggttttttaaaaggaaatgtaaaagcacatgagaatgctagcaggctgtggggcagctgagcagcttttctccccccatatctgcgtgcacttcccagagcatcttgcatccaaacctgtaacctttcggcaaggacggtaacttggctgcatttgcctgtcatgcgcaactggagccagcaaccagctatccatcagcaccccagtggaggagttcatggaagagttccctctttgtttctgcttcatttttctttcttttcttttctcctaaagcttttatttaacagtgcaaaaggatcgtttttttttgcttttttaaacttgaatttttttaatttacactttttagttttaattttcttgtatattttgctagctatgagcttttaaataaaattgaaagttctggaaaagtttgaaataatgacataaaaagaagccttctttttctgagacagcttgtctggtaagtggcttctctgtgaattgcctgtaacacatagtggcttctccgcccttgtaaggtgttcagtagagctaaataaatgtaatagccaaaccccactctgttggtagcaattggcagccctatttcagtttattttttcttctgttttcttcttttctttttttaaacagtaaaccttaacagatgcgttcagcagactggtttgcagtgaattttcatttctttccttatcacccccttgttgtaaaaagcccagcacttgaattgttattactttaaatgttctgtatttgtatctgtttttattagccaattagtgggattttatgccagttgttaaaatgagcattgatgtacccattttttaaaaaagcaagcacagcctttgcccaaaactgtcatcctaacgtttgtcattccagtttgagttaatgtgctgagcatttttttaaaagaagctttgtaataaaacatttttaaaaattgtcatttaaaaaaaaaaaaaaaaaa

SEQ ID NO: 1358 - protein, 399 aa, Homo sapien
MPQLSGGGGGGGGDPELCATDEMIPFKDEGDPQKEKIFAEISHPEEEGDLADIKSSLVNESEIIPASNGHEVARQAQTSQEPYHDKAREHPDDGKHPDGGLYNKGPSYSSYSGYIMMPNMNNDPYMSNGSLSPPIPRTSNKVPVVQPSHAVHPLTPLITYSDEHFSPGSHPSHIPSDVNSKQGMSRHPPAPDIPTFYPLSPGGVGQITPPLGWQGQPVYPITGGFRQPYPSSLSVDTSMSRFSHHMIPGPPGPHTTGIPHPAIVTPQVKQEHPHTDSDLMHVKPQHEQRKEQEPKRPHIKKPLNAFMLYMKEMRANVVAECTLKESAAINQILGRRWHALSREEQAKYYELARKERQLHMQLYPGWSARDNYGKKKKRKREKLQESASGTGPRMTAAYI

SEQ ID NO: 1359 - DNA, 1637 bp, Homo sapien
gtgggactgggatcatcagtctcttctgtgcacactatgcgcggcctagagcggtgtacgcggtggaggccagtgagatggcacagcacacggggcagctggtcctgcagaacggctttgctgacatcatcaccgtgtaccagcagaaggtggaggatgtggtgctgcccgagaaggtggacgtgctggtgtctgagtggatggggacctgcctgctgtttgagttcatgatcgagtccatcctgtatgcccgggatgcctggctgaaggaggacggggtcatttggcccaccatggctgcgttgcaccttgtgccctgcagtgctgataaggattatcgtagcaaggtgctcttctgggacaacgcgtacgagttcaacctcagcgctctgaagtaagtgtccacagctgggactggcaccgtcttgtggggcctcctggtccacagtctgcaggtgggccaaggccctgggagatcccatacgacggttggataaatgagggtacctgtgcacccagataggacaatctgttgtagcattggagtaattaaagcagtatggtgctataacaagacagatgggcagagcagggtagaatgcaaggaacaaaaattttcgtatgtgaaaaaggtggcattacgattaggagggagtgagggccaagtcagcaaattattctggagcagttgattagcccttgttctctcacgccatacgtgaaaacttaattctgcatggaatcagcgtcagcgacagacatccatgggggcctgtgtgcaccatcttaggtggagaaatgagcagcaacaatggatggaatggaccctgggctagatagaatctggcagtctatgtggcagaaatcagcaaaaacacgattgtaaaagcaaacaagtaattagagaaatcacgtgctgtcaggtcttggaatcaattagaaagagatgactagccagatggaattgcagcccaatcatgtgaacaggcaaaccgcaaaaaataaataaaattaccaataaatacatgaaaaattataatgttgttagtagttaaaatgcgaattaaaatacatgctgttttccctaccagacaagcaaagagtaaattaaaatagtagcccaggcttgcctggcagtggcagggaggtgtggctgccagggccttagaggttggcatcaggctgcccaccccagtcactgccagagcctcccacctgagtgttcctcccggcactggaagccagtggccgtccagaggaacgtgattgaattgctgtatatccatctggtggagcactgctgtgtgtctgttaaaaaagaaaccataggtttttagggatatgtaatgatatttagaaagggtttaagagacagtaaagcttggcagaataaaccgtgtatacagaatggatgtttgcttgcataaataaatttatataaatatgtctgggggataaaaataagtatatcacaatgctaagacaggcatatggggaatttaagcttttctttatacttgtccatagtttccaatttttaaatttgtaattttttatcagaaaaataaatgtgtaaatatagtggaatctttattaaaacattcacttttatttgctaaaaaaaaaaaaaaaaaaaa

SEQ ID NO: 1360 - DNA, 1977 bp, Homo sapien
ggcacgaggatttcctcatcgtcaagctttgttcctcgtgggggctagaaatctctttccagttccagattgtgaagggttcctgagtaagcagcgtgtctccatccccctctctaggggctcttggatggaccttgcactctagaagggacaatggacttctggctttggccactttacttcctgccagtatcgggggccctgaggatcctcccagaagtaaaggtagagggggagctgggcggatcagttaccatcaagtgcccacttcctgaaatgcatgtgaggatatatctgtgccgggagatggctggatctggaacatgtggtaccgtggtatccaccaccaacttcatcaaggcagaatacaagggccgagttactctgaagcaatacccacgcaagaatctgttcctagtggaggtaacacagctgacagaaagtgacagcggagtctatgcctgcggagcgggcatgaacacagaccggggaaagacccagaaagtcaccctgaatgtccacagtgaatacgagccatcatgggaagagcagccaatgcctgagactccaaaatggtttcatctgccctatttgttccagatgcctgcatatgccagttcttccaaattcgtaaccagagttaccacaccagctcaaaggggcaaggtccctccagttcaccactcctcccccaccacccaaatcacccaccgccctcgagtgtccagagcatcttcagtagcaggtgacaagccccgaaccttcctgccatccactacagcctcaaaaatctcagctctggaggggctgctcaagccccagacgcccagctacaaccaccacaccaggctgcacaggcagagagcactggactatggctcacagtctgggagggaaggccaaggatttcacatcctgatcccgaccatcctgggccttttcctgctggcacttctggggctggtggtgaaaagggccgttgaaaggaggaaagccctctccaggcgggcccgccgactggccgtgaggatgcgcgccctggagagctcccagaggccccgcgggtcgccgcgaccgcgctcccaaaacaacatctacagcgcctgcccgcggcgcgctcgtggagcggacgctgcaggcacaggggaggcccccgttcccggccccggagcgccgttgccccccgccccgctgcaggtgtctgaatctccctggctccatgccccatctctgaagaccagctgtgaatacgtgagcctctaccaccagcctgccgccatgatggaggacagtgattcagatgactacatcaatgttcctgcctgacaactccccagctatcccccaaccccaggctcggactgtggtgccaaggagtctcatctatctgctgatgtccaatacctgcttcatgtgttctcagagccctcatcacttcccatgccccatctcgactcccatccccatctatctgtgccctgagcatggctctgcccccaggtcgtcttgcacaccttggcagccccctgtagttgacaggtaagctgtaggcatgtagagcaattgtcccaatgccacttgcttcctttccaagccgtcgaacagactgtgggatttgcagagtgtttcttccatgtctttgaccacagggttgttgctgcccaggctctagatcacatggcatcaggctggggcagaggcatagctattgtctcgggcatccttcccagggttgggtcttacacaaatagaaggctcttgctctgagttatgtgacatgcctcagccccatggactaagcaggggtctggtataaaaacactcctggaaacgcctttgccctgatccaaatgttagcacttgctagtgaacgtctacttatctcaagttctatgctaaaggcaatttatcttgatgtgatgataaaccaaacttattagcaagatatgcatatatatcaaaaaaaaaaaaaaaaaa

SEQ ID NO: 1361 - protein, 390 aa, Homo sapien
MDFWLWPLYFLPVSGALRILPEVKVEGELGGSVTIKCPLPEMHVRIYLCREMAGSGTCGTVVSTTNFIKAEYKGRVTLKQYPRKNLFLVEVTQLTESDSGVYACGAGMNTDRGKTQKVTLNVHSEYEPSWEEQPMPETPKWFHLPYLFQMPAYASSSKFVTRVTTPAQRGKVPPVHHSSPTTQITHRPRVSRASSVAGDKPRTFLPSTTASKISALEGLLKPQTPSYNHHTRLHRQRALDYGSQSGREGQGFHILIPTILGLFLLALLGLVVKRAVERRKALSRRARRLAVRMRALESSQRPRGSPRPRSQNNIYSACPRRARGADAAGTGEAPVPGPGAPLPPAPLQVSESPWLHAPSLKTSCEYVSLYHQPAAMMEDSDSDDYINVPA

SEQ ID NO: 1362 - DNA, 2427 bp, Homo sapien
cggacgcgtggggagaggctgtttaccagaacagcataacaagggcaggtctgactgcaaggctgggactgggaggcagagccgccgccaagggggcctcggttaaacactggtcgttcaatcacctgcaagacgaaggaggcaaggatgctgttggcctgggtacaagcattcctcgtcagcaacatgctcctagcagaagcctatggatctggaggctgtttctgggacaacggccacctgtaccgggaggaccagacctcccccgcgccgggcctccgctgcctcaactggctggacgcgcagagcgggctggcctcggcccccgtgtcgggggccggcaatcacagttactgccgaaacccggacgaggacccgcgcgggccctggtgctacgtcagtggcgaggccggcgtccctgagaaacggccttgcgaggacctgcgctgtccagagaccacctcccaggccctgccagccttcacgacagaaatccaggaagcgtctgaagggccaggtgcagatgaggtgcaggtgttcgctcctgccaacgccctgcccgctcggagtgaggcggcagctgtgcagccagtgattgggatcagccagcgggtgcggatgaactccaaggagaaaaaggacctgggaactctgggctacgtgctgggcattaccatgatggtgatcatcattgccatcggagctggcatcatcttgggctactcctacaagagggggaaggatttgaaagaacagcatgatcagaaagtatgtgagagggagatgcagcgaatcactctgcccttgtctgccttcaccaaccccacctgtgagattgtggatgagaagactgtcgtggtccacaccagccagactccagttgaccctcaggagggcagcaccccccttatgggccaggccgggactcctggggcctgagcccccccagtgggcaggagcccatgcagacactggtgcaggacagcccaccctcctacagctaggaggaactaccactttgtgttctggttaaaaccctaccactcccccgcttttttggcgaatcctagtaagagtgacagaagcaggtggccctgtgggctgagggtaaggctgggtagggtcctaacagtgctccttgtccatcccttggagcagattttgtctgtggatggagacagtggcagctcccacagtgatgctgctgctaagggcttccaaacattgcctgcacccctggaactgaaccagggatagacggggagctcccccaggctcctctgtgctttactaagatggcctcagtctccactgtgggcttgagtggcatacactgttattcatggttaaggtaaagcaggtcaagggatggcattgaaaaaatatatttagtttttaaaatatttgggatggaactccctactgacctctgagaactggaaacgagtttgtacagaagtcagaactttgggttgggaatgagatctaggttgtggctgctggtatgcttcagcttgctggcaatgatgtgccttgacaaccgtgggccaggcctgggcccagggactcttcctgtttcataaggaaaggaagaattgcactgagcattccacttaggaagaggatagagaaggatctgctccgcctttggccacaggagcagaggcagacctgggatgccccagtttctcttcagggatggatagtgacctgtcttcattttgcacaggtaagagagtagttagctaacctatgggaattatactgtggggccttgtgagctgcttctaagaggctaacctggaaactaagctcagaggcaaggtaataaagcacttcagggcttgctccccaagtgggcctgatttagcaggtggtcctgcgggcgtccaggtcagcaccttcctgtagggcactggggctagggtcacagcccctaactcataaagcaatcaaagaaccattagaaagggctcattaagccttttggacacaggaccccagagaggaaaaagtgacttgcccaaggtcgtaagcaagctactggcatggcaagagcccagcttcctgacggagcgcaacatttctccactgcactgtgctagcagctcagcagggcctctaacctgtgatgtcacactcaagaggccttggcagctcctagccatagagcttcctttccagaacccttccactgcccaatgtggagacaggggttagtggggctttctatggagccatctgctttggggacctagacctcaggtggtctcttggtgttagtgatgctggagaagagaatattactggtttctacttttctataaaggcatttctctatatacatgttttatatacctcattctgacacctgcatatagtgtgggaaattgctctgcatttgacttaattaaaaaaaaaaaaaaa

SEQ ID NO: 1363 - protein, 263 aa, Homo sapien
MLLAWVQAFLVSNMLLAEAYGSGGCFWDNGHLYREDQTSPAPGLRCLNWLDAQSGLASAPVSGAGNHSYCRNPDEDPRGPWCYVSGEAGVPEKRPCEDLRCPETTSQALPAFTTEIQEASEGPGADEVQVFAPANALPARSEAAAVQPVIGISQRVRMNSKEKKDLGTLGYVLGITMMVIIIAIGAGIILGYSYKRGKDLKEQHDQKVCEREMQRITLPLSAFTNPTCEIVDEKTVVVHTSQTPVDPQEGSTPLMGQAGTPGA

SEQ ID NO: 1364 - DNA, 2611 bp, Homo sapien
aaaataaagatgactatatcagagacttgaaaaggatcattctctgttttctgatagtgtatatggccattttagtgggcacagatcaggatttttacagtttacttggagtgtccaaaactgcaagcagtagagaaataagacaagctttcaagaaattggcattgaagttacatcctgataaaaacccgaataacccaaatgcacatggcgattttttaaaaataaatagagcatatgaagtactcaaagatgaagatctacggaaaaagtatgacaaatatggagaaaagggacttgaggataatcaaggtggccagtatgaaagctggaactattatcgttatgattttggtatttatgatgatgatcctgaaatcataacattggaaagaagagaatttgatgctgctgttaattctggagaactgtggtttgtaaatttttactccccaggctgttcacactgccatgatttagctcccacatggagagactttgctaaagaagtggatgggttacttcgaattggagctgttaactgtggtgatgatagaatgctttgccgaatgaaaggagtcaacagctatcccagcctcttcatttttcggtctggaatggccccagtgaaatatcatggagacagatcaaaggagagtttagtgagttttgcaatgcagcatgttagaagtacagtgacagaactttggacaggaaattttgtcaactccatacaaactgcttttgctgctggtattggctggctgatcactttttgttcaaaaggaggagattgtttgacttcacagacacgactcaggcttagtggcatgttggatggtcttgttaatgtaggatggatggactgtgccacccaggataacctttgtaaaagcttagatattacaacaagtactactgcttattttcctcctggagccactttaaataacaaagagaaaaacagtattttgtttctcaactcattggatgctaaagaaatatatttggaagtaatacataatcttccagattttgaactactttcggcaaacacactagaggatcgtttggctcatcatcggtggctgttattttttcattttggaaaaaatgaaaattcaaatgatcctgagctgaaaaaactaaaaactctacttaaaaatgatcatattcaagttggcaggttcgactgttcctctgcaccagacatctgtagtaatctgtatgtttttcagccgtctctagcagtatttaaaggacaaggaaccaaagaatatgaaattcatcatggaaagaagattctatatgatatacttgcctctgccaaagaaagtgtgaattctcatgttaccacgcttggacctcaaaattttcctgccaatgacaaagaaccatggcttgttgatttctttgccccctggtgtccaccatgtcgagctttactaccagagttacgaagagcatcaaatcttctttatggtcagcttaagtttggtacactagattgtacagttcatgagggactctgtaacatgtataacattcaggcttatccaacaacagtggtattcaaccagtccaacattcatgagtatgaaggacatcactctgctgaacaaatcttggagttcatagaggatcttatgaatccttcagtggtctcccttacacccaccaccttcaacgaactagttacacaaagaaaacacaacgaagtctggatggttgatttctattctccgtggtgtcatccttgccaagtcttaatgccagaatggaaaagaatggcccggacattaactggactgatcaacgtgggcagtatagattgccaacagtatcattctttttgtgcccaggaaaacgttcaaagataccctgagataagattttttcccccgaaatcaaataaagcttatcattatcacagttacaatggttggaatagggatgcttattccctgagaatctggggtctaggatttttacctcaagtatccacagatctaacacctcagactttcagtgaaaaagttctacaagggaaaaatcattgggtgattgatttctatgctccttggtgtggaccttgccagaattttgctccagaatttgagctcttggctaggatgattaaaggaaaagtgaaagctggaaaagtagactgtcaggcttatgctcagacatgccagaaagctgggatcagggcctatccaactgttaaattttatttctacgaaagagcaaagagaaattttcaagaagagcagataaataccagagatgcaaaagcaatcgctgccttaataagtgaaaaattggaaactctccgaaatcaaggcaagaggaataaggatgaactttgataatgttgaagatgaagaaaaagtttaaaagaaattctgacagatgacatcagaagacacctatttagaatgttacatttatgatgggaatgaatgaacattatcttagacttgcagttgtactgccagaattatctacagcactggtgtaaaagaagggtctgcaaactttttctgtaaagggccggtttataaatattttagactttgcaggctataatatatggttcacacatgagaac

SEQ ID NO: 1365 - protein, 768 aa, Homo sapien [sequence omitted]

SEQ ID NO: 1366 - DNA, 926 bp, Homo sapien
ctgaattacgaaggcagtccaattaaagtaacactggcaactttgaaaatgtctgtacagccaacggtttcccttgggggctttgaaataacaccaccagtggtcttaaggttgaagtgtggttcagggccagtgcatattagtggacagcacttagtagctgtggaggaagatgcagagtcagaagatgaagaggaggaggatgtgaaactcttaagtatatctggaaagcggtctgcccctggaggtggtagcaaggttccacagaaaaaagtaaaacttgctgctgatgaagatgatgacgatgatgatgaagaggatgatgatgaagatgatgatgatgatgattttgatgatgaggaagctgaagaaaaagcgccagtgaagaaatctatacgagatactccagccaaaaatgcacaaaagtcaaatcagaatggaaaagactcaaaaccatcatcaacaccaagatcaaaaggacaagaatccttcaagaaacaggaaaaaactcctaaaacaccaaaaggacctagttctgtagaagacattaaagcaaaaatgcaagcaagtatagaaaaagcgcattgaacagtcctgggcactacatgtaaattaagcccaaagatggggagaaaggaaaaggagagacaaatatagtccatactgagtgtcatcaacaatccagactgaagtcttctattttaatctcaatccccttttctgatttgccacccatgcctcttcaggctggaaacaatctcttggttccctaaagcactttcttctgactgctgtgattcagtgaaccttgccctttgctttctattacttgtgcatttgcctcacctgacaatgttttaaatcgcctttgtatctccttagctgctcaataaatatttgaatgcatcaaaaaaaaaaaaaaaaaa

SEQ ID NO: 1367 - protein, 179 aa, Homo sapien
MSVQPTVSLGGFEITPPVVLRLKCGSGPVHISGQHLVAVEEDAESEDEEEEDVKLLSISGKRSAPGGGSKVPQKKVKLAADEDDDDDDEEDDDEDDDDDDFDDEEAEEKAPVKKSIRDTPAKNAQKSNQNGKDSKPSSTPRSKGQESFKKQEKTPKTPKGPSSVEDIKAKMQASIEKAH

SEQ ID NO: 1368 - DNA, 3492 bp, Homo sapien
aagccgtgcgctcccgggctgcgaggtctggctaggctacgggccacgcgccgccgccgctgccgccgccactgtcctcttcggaggcgcgggcccgacggaaaccatgtttgtggctcgcagcatcgcggcggaccacaaggatctcatccacgatgtctctttcgacttccacgggcggcggatggcaacctgctccagcgatcagagcgttaaggtctgggataaaagtgaaagtggtgattggcattgtacagctagctggaagacacatagtggatctgtatggcgtgtgacatgggcccatcctgaatttgggcaagttttggcttcctgttcttttgaccgaacagctgctgtatgggaagaaatagtaggagaatcaaatgataaactgcgaggacagagccactgggttaaaaggacaactctggtggatagcagaacatctgttactgatgtgaagtttgctcccaagcacatgggtcttatgttagcaacctgttccgcagatggtatagtaagaatctatgaggcaccagatgttatgaatctcagccagtggtctttgcagcatgagatctcatgtaagctaagctgtagttgcatttcttggaacccttcaagctctcgtgctcattcccccatgatcgccgtaggaagtgatgacagtagccccaacgcaatggccaaggttcagatttttgaatataatgaaaacaccaggaaatatgcaaaagctgaaactcttatgacagtcactgatcctgttcatgatattgcattcgctccaaatttgggaagatctttccatattctagcaatagcgaccaaagatgtgagaatttttacattaaagcctgtgaggaaagaactgacttcctctggtgggccaacaaagtttgaaatccatatagtggctcagttcgataatcataattctcaggtctggcgagtgagttggaatataacaggaacggtgctagcatcttcaggagatgatgggtgtgtaagattgtggaaagctaattatatggacaattggaagtgtactggtattttgaaaggtaatgggagcccagtcaatgggagttctcagcagggaacctcaaatccttccctaggttcaaatattccaagtcttcagaattcattaaatggatcttctgctggcagaaagcacagctgagacaagctaactggagtaactttgctgttttgctgcttgttgcatgcacactggaatggaaagcgagctcccttttccccttccccagcgccgtttgacctctcccaaggatacaccagcagcctgcttactactaaacgcaatccaaaaggcctttaaaaatacagtgtatattttttgtactagtcagtttattgacactatttgaaacttttgaaatataaacggagaggctttctgttgagacattgtcaccaaaacaattttttgaaatgttcctgaaactaatttgggtttaaagattaaaagggttgttaccattcttatctgagtagttgggaggaggggaataccactttagttcatttggaaaatatagacatatttcttttgctttcttaaaacagcttaaaatgatgaacttttataattttaatttgaagattgaataaatattttttataaagattgttttgagtgctgatttgtttactttttgtagatttgctttatccatgatattcagtacaactctgtcatttctttgtaatatttaaaaaatattagtaaaggagtgaattaataaagtagtaatagtaaaatgaaaggaacttgactgtacagtttgtagcccaggttaaggcatttgggtattgtttcatttaaccaatttggggactaagatgggaaacactttttttattaagtttttaattcatagtcactaaagagataaatgtttcttatatacatttgtgtatttttatggtgttatttattccatggcttagcttccttcaaatcaaaatttggacacacactattaagagaagccattaaaattttactaaaattgtgcatgtaaattaattgtcagcattccatgtctcaagattttcttaatttagttcgctgtttaaattaattcatgtcctgtaaagttctgaccttgataacaaagctataaatatttaagtttgctaatatgcgtaagtattatcggtaagttacaagatggaagaagaataacagtagggcacagtcattctgtgaatccttttacttatcaaaatttggtagctattctaaggcttttgcagaaaaataagtgttcaatgtttgtagttcttcaaaagcatgttgcagtagccagccatactatgtgtattcccagtatcatgtacgcactaaaaaaaatgtgtgcttgctgctgctgtgagtgaaccattgcttaagataaaaaacttaactagatctgtaaatgtacagaatagcatcagatgtttctgagagattaggaaaatgttttgaatttataaaattaatgtttttctttgtaacatttatatatattttttaacattttaagtttaacagattgtattcctttcaagtttctatacttgcttaagcaatcttgatttgagtaagggtcttgatttgtgctattatgttctgttagttttggcatgaatatactaaagcttttttttttttttttagcatgtgttttctcctctttggttctctttgtatttactacttttctctttttcttgtgttttttttttcctgtttttgttttgtttggtgttttgttcctgtcttcattgtttcaggtatttctttacccctctggattccccacgggctggatcgagatggtccagttatgcccagctccttcctcctcctcctcctcctctggtagagcactcttgcgatgctgacactgccaacctccagtatcctcaccctcgcagacgatatctctctcggcctcttaatcccttacctgagaatgaagggatttaaaacactgatttaacattgaaaggccttattcaagtgcttgtaaatgctttcatttctggctgctttttgtttttcattttctttcagaagatttttctaacttagggtctgtcttgcatgtattacaaccagaatacagtgtttggaacctaaatctgtttgtgcgtctgcatcaaaggaacatttgcttcactgggtgataacctttgatgaaatgagatatgtccaagtaacgttaactgtgaagttacacacagtagctgacttcaaagtgcctgttcctgtaaattttattttaaactgttaccatagtcttaagttgtttatgctttatcagactggctaatgtgaaagcataatattatgaagtttattctgccttatgagaccttaaaaaatggatttcattttacaggctaatgttgtaactgactagtatgtaaaataaatcattcctgtgtataaagcagcaaaacctaaaaaaaaaa

SEQ ID NO: 1369 - protein, 360 aa, Homo sapien
MFVARSIAADHKDLIHDVSFDFHGRRMATCSSDQSVKVWDKSESGDWHCTASWKTHSGSVWRVTWAHPEFGQVLASCSFDRTAAVWEEIVGESNDKLRGQSHWVKRTTLVDSRTSVTDVKFAPKHMGLMLATCSADGIVRIYEAPDVMNLSQWSLQHEISCKLSCSCISWNPSSSRAHSPMIAVGSDDSSPNAMAKVQIFEYNENTRKYAKAETLMTVTDPVHDIAFAPNLGRSFHILAIATKDVRIFTLKPVRKELTSSGGPTKFEIHIVAQFDNHNSQVWRVSWNITGTVLASSGDDGCVRLWKANYMDNWKCTGILKGNGSPVNGSSQQGTSNPSLGSNIPSLQNSLNGSSAGRKHS

SEQ ID NO: 1370 - DNA, 2092 bp, Homo sapien
ggcgtcccctccgtgaggtcgcgcccgttcgcaccgcccccgcccgcaagaaagatggcagtggcctgatccgggcccgttggcggcgtcactgacgcttcgctccggtcctcggatcccgagcgcggggaggcagaccgactgtgagctgcttgtccccatcctgcggccgtcctggggacacagagccctccgtggtgcccggggattggattggagccaggacctcacttcctcctctgcccctgcccctgcccctcccagcacctggcccacaccctgcagcccgccccatggtctggccctgggtggcgatggcgtccaggtggggtcccctcattggcctggctccgtgctgcctctggctcctgggggcagtccttctgatggacgcgtctgcacggcctgccaaccactcgtccactcgagagagagtagccaacagggaggagaatgagatcctgcccccagaccacctgaacggggtgaagctggagatggacgggcacctcaatcgcggcttccaccaggaggtcttcctaggcaaggacctgggtggctttgatgaggacgcggagccgcggcggagccggaggaagctgatggtcatcttttccaaggtggatgtgaacactgaccggaagatcagtgccaaggagatgcagcgctggatcatggagaagacggccgagcacttccaggaggccatggaggagagcaagacacacttccgcgccgtggaccctgacggggacggtcacgtgtcttgggacgagtataaggtgaagtttttggcgagtaaaggccatagcgagaaggaggttgccgacgccatcaggctcaacgaggaactcaaagtggacgaggaaacacaggaagtcctggagaacctgaaggaccgctggtaccaggcggacagcccccctgcagacctgctgctgacggaggaggagttcctgtcgttcctccaccccgagcacagccggggaatgctcaggttcatggtgaaggagatcgtccgggacctggaccaggacggtgacaagcagctctctgtgcccgagttcatctccctgcccgtgggcaccgtggagaaccagcagggccaggacattgacgacaactgggtgaaagacagaaaaaaggagtttgaggagctcattgactccaaccacgacggcatcgtgaccgccgaggagctggagaacgtgcccacactcccgctgcagccaataggcaccttaaatagccacttcgtgcggctggccgcggagctcggagggggaaaggcgacgctgacctgtgccccgctcgcccgcagagctacatggaccccatgaacgagtacaacgcgctgaacgaggccaagcagatgatcgccgtcgccgacgagaaccagaaccaccacctggagcccgaggaggtgctcaagtacagcgagttcttcacgggcagcaagctggtggactacgcgcgcagcgtgcacgaggagttttgagcgcccggccgcgccccgcgccgccccccacgcaccaccgggggggcctcgcgggtgactccggcctccgtggctgtcccggaccccacctcttctctgccgcccaccaccggccgaccgaccgcggcttccccagttgatgagcggcgtgtcccctctgcagcgcgcaccccggcggggctttggctgtgacgcggtcggggcgcggggctggtctgtggccccgcggcgcgcctcctccctggtccctcgaaatcgtggcatctcacttctgagaacgaaatctcgcttcagtcactctgccgaaggcgctgacggcatcgcggccggaacctctgggcccggcccctcccagggccgccgctccgtgggaaaaaacagctcctccatttccttggaaactgaacgattattaaaaatagataaacttcgctggaaatgagtagccaggaagttcaggggagggtccggggtccttcccggggcctggcgtgtcggaaccacccaggtcccgcagctgcctctgagaaaatccaaatattttttgtgacaagaatcacaaacatttactttaaatataaaaaaaaaaaaaaa

SEQ ID NO: 1371 - protein, 362 aa, Homo sapien
MVWPWVAMASRWGPLIGLAPCCLWLLGAVLLMDASARPANHSSTRERVANREENEILPPDHLNGVKLEMDGHLNRGFHQEVFLGKDLGGFDEDAEPRRSRRKLMVIFSKVDVNTDRKISAKEMQRWIMEKTAEHFQEAMEESKTHFRAVDPDGDGHVSWDEYKVKFLASKGHSEKEVADAIRLNEELKVDEETQEVLENLKDRWYQADSPPADLLLTEEEFLSFLHPEHSRGMLRFMVKEIVRDLDQDGDKQLSVPEFISLPVGTVENQQGQDIDDNWVKDRKKEFEELIDSNHDGIVTAEELESYMDPMNEYNALNEAKQMIAVADENQNHHLEPEEVLKYSEFFTGSKLVDYARSVHEEF

SEQ ID NO: 1372 - DNA, 1853 bp, Homo sapien
ggcacgagggtccctgggccggacggcggtgtcccggcgtggcgggaagccggcactggagcgggagcgcactgggcgcgggaccgggaggcgcagggaccggacggctcccgagtcgcccacctgacgctagaagaagtcttcacttcccaggagagccaaagcgtgtctggccctaggtgggaaaagaactggctgtgacctttgccctgacctggaagggcccagccttgggctgaatggcagcacccacgcccgcccgtccggtgctgacccacctgctggtggctctcttcggcatgggctcctgggctgcggtcaatgggatctgggtggagctacctgtggtggtcaaagagcttccagagggttggagcctcccctcttacgtctctgtgcttgtggctctggggaacctgggtctgctggtggtgaccctctggaggaggctggccccaggaaaggacgagcaggtccccatccgggtggtgcaggtgctgggcatggtgggcacagccctgctggcctctctgtggcaccatgtggccccagtggcaggacagttgcattctgtggccttcttagcactggcctttgtgctggcactggcatgctgtgcctcgaatgtcactttcctgcccttcttgagccacctgccacctcgcttcttacggtcattcttcctgggtcaaggcctgagtgccctgctgccctgcgtgctggccctagtgcagggtgtgggccgcctcgagtgcccgccagcccccatcaacggcacccctggccccccgctcgacttccttgagcgttttcccgccagcaccttcttctgggcactgactgcccttctggtcgcttcagctgctgccttccagggtcttctgctgctgttgccgccaccaccatctgtacccacaggggagttaggatcaggcctccaggtgggagccccaggagcagaggaagaggtggaagagtcctcaccactgcaagagccaccaagccaggcagcaggcaccacccctggtccagaccctaaggcctatcagcttctatcagcccgcagtgcctgcctgctgggcctgttggccgccaccaacgcgctgaccaatggcgtgctgcctgccgtgcagagcttttcctgcttaccctacgggcgtctggcctaccacctggctgtggtgctgggcagtgctgccaatcccctggcctgcttcctggccatgggtgtgctgtgcaggtccttggcagggctgggcggcctctctctgctgggcgtgttctgtgggggctacctgatggcgctggcagtcctgagcccctgcccgcccctggtgggcacctcggcgggggtggtcctcgtggtgctgtcgtgggtgctgtgtcttggcgtgttctcctacgtgaaggtggcagccagctccctgctgcatggcgggggccggccggcattgctggcagccggcgtggccatccaggtgggctctctgctcggcgctgttgctatgttccccccgaccagcatctatcacgtgttccacagcagaaaggactgtgcagacccctgtgactcctgagcctgggcaggtggggaccccgctccccaacacctgtctttccctcaatgctgccaccatgcctgagtgcctgcagcccaggaggcccgcacaccggtacactcgtggacacctacacactccataggagatcctggctttccagggtgggcaagggcaaggagcaggcttggagccagggaccagtgggggctgtagggtaagcccctgagcctgggacctacatgtggtttgcgtaataaaacatttgtatttaaaaaaaaaaaaaaaaaaaaa

SEQ ID NO: 1373 - protein, 445 aa, Homo sapien
MAAPTPARPVLTHLLVALFGMGSWAAVNGIWVELPVVVKELPEGWSLPSYVSVLVALGNLGLLVVTLWRRLAPGKDEQVPIRVVQVLGMVGTALLASLWHHVAPVAGQLHSVAFLALAFVLALACCASNVTFLPFLSHLPPRFLRSFFLGQGLSALLPCVLALVQGVGRLECPPAPINGTPGPPLDFLERFPASTFFWALTALLVASAAAFQGLLLLLPPPPSVPTGELGSGLQVGAPGAEEEVEESSPLQEPPSQAAGTTPGPDPKAYQLLSARSACLLGLLAATNALTNGVLPAVQSFSCLPYGRLAYHLAVVLGSAANPLACFLAMGVLCRSLAGLGGLSLLGVFCGGYLMALAVLSPCPPLVGTSAGVVLVVLSWVLCLGVFSYVKVAASSLLHGGGRPALLAAGVAIQVGSLLGAVAMFPPTSIYHVFHSRKDCADPCDS

SEQ ID NO: 1374 - DNA, 1953 bp, Homo sapien
ggcacgagggtccgcgggagccgccgccgccgccgtcccgtcccagctgccgccccgcgcggccccgccgccggccaggatgctggaggaagcgggcgaggtgctggagaacatgctgaaggcgtcttgtctgcctctcggcttcatcgtcttcctgcccgctgtgctgctgctggtggcgccgccgctgcctgccgccgacgccgcgcacgagttcaccgtgtaccgcatgcagcagtacgacctgcagggccagccctacggcacacggaatgcagtgctgaacacggaggcgcgcacgatggcggcggaggtgctgagccgccgctgcgtgctcatgcggctactggacttctcctacgagcagtaccagaaggccctgcggcagtcggcgggcgccgtggtcatcatcctgcccagggccatggccgccgtgccccaggacgtcgtccggcaattcatggagatcgagccggagatgctggccatggagaccgccgtccccgtgtactttgccgtggaggacgaggccctgctgtctatctacaagcagacccaggctgcctccgcctcccagggctccgcctctgctgctgaagtactgctgcgcacggccactgccaacggcttccagatggtcaccagcggggtacagagcaaggccgtgagtgactggctgattgccagcgtggaggggcggctgacggggctgggcggagaggaccttcccaccatcgtcatcgtggcccactacgacgcctttggagtggccccctggctgtcgctgggcgcggactccaacgggagcggcgtctctgtgctgctggagctggcacgcctcttctcccggctctacacctacaagcgcacgcacgccgcctacaacctcctgttctttgcgtctggaggaggcaagtttaactaccagggaaccaagcgctggctggaagacaacctggaccacacagactccagcctgcttcaggacaatgtggccttcgtgctgtgcctggacaccgtgggccggggcagcagcctgcacctgcacgtgtccaagccgcctcgggagggcaccctgcagcacgccttcctgcgggagctggagacggtggccgcgcaccagttccctgaggtacggttctccatggtgcacaagcggatcaacctggcggaggacgtgctggcctgggagcacgagcgcttcgccatccgccgactgcccgccttcacgctgtcccacctggagagccaccgtgacggtcagcgcagcagcatcatggacgtgcggtcccgggtggattctaagaccctgacccgtaacacgaggatcattgcagaggccctgactcgagtcatctacaacctgacagagaaggggacacccccagacatgccggtgttcacagagcagatgcagatccagcaggagcagctggactcggtgatggactggctcaccaaccagccgcgggccgcgcagctggtggacaaggacagcaccttcctcagcacgctggagcaccacctgagccgctacctgaaggacgtgaagcagcaccacgtcaaggctgacaagcgggacccagagtttgtcttctacgaccagctgaagcaagtgatgaatgcgtacagagtcaagccggccgtctttgacctgctcctggctgttggcattgctgcctacctcggcatggcctacgtggctgtccagcacttcagcctcctctacaagaccgtccagaggctgctcgtgaaggccaagacacagtgacacagccacccccacagccggagcccccgccgctccacagtccctggggccgagcacgagtgagtggacactgccccgccgcgggcggccctgcagggacaggggccctctccctccccggcggtggttggaacactgaattacagagcttttttctgttgctcaaaaaaaaaaaaaaaaaa

SEQ ID NO: 1375 - protein, 552 aa, Homo sapien [sequence omitted]

SEQ ID NO: 1376 - DNA, 2430 bp, Homo sapien
cacacccgcactcctcccgggtttctgctctccgcccgtgtggagtggtgggggcctgggtgggaatgggcgtgtgccagcgcacgcgcgctccctggaaggagaagtctcagctagaacgagcggccctaggttttcggaagggaggatcagggatgtttgcgagcggctggaaccagacggtgccgatagaggaagcgggctccatggctgccctcctgctgctgcccctgctgctgttgctaccgctgctgctgctgaagctacacctctggccgcagttgcgctggcttccggcggacttggcctttgcggtgcgagctctgtgctgcaaaagggctcttcgagctcgcgccctggccgcggctgccgccgacccggaaggtcccgaggggggctgcagcctggcctggcgcctcgcggaactggcccagcagcgcgccgcgcacacctttctcattcacggctcgcggcgctttagctactcagaggcggagcgcgagagtaacagggctgcacgcgccttcctacgtgcgctaggctgggactggggacccgacggcggcgacagcggcgaggggagcgctggagaaggcgagcgggcagcgccgggagccggagatgcagcggccggaagcggcgcggagtttgccggaggggacggtgccgccagaggtggaggagccgccgcccctctgtcacctggagcaactgtggcgctgctcctccccgctggcccagagtttctgtggctctggttcgggctggccaaggccggcctgcgcactgcctttgtgcccaccgccctgcgccggggccccctgctgcactgcctccgcagctgcggcgcgcgcgcgctggtgctggcgccagagtttctggagtccctggagccggacctgcccgccctgagagccatggggctccacctgtgggctgcaggcccaggaacccaccctgctggaattagcgatttgctggctgaagtgtccgctgaagtggatgggccagtgccaggatacctctcttccccccagagcataacagacacgtgcctgtacatcttcacctctggcaccacgggcctccccaaggctgctcggatcagtcatctgaagatcctgcaatgccagggcttctatcagctgtgtggtgtccaccaggaagatgtgatctacctcgccctcccactctaccacatgtccggttccctgctgggcatcgtgggctgcatgggcattggggccacagtggtgctgaaatccaagttctcggctggtcagttctgggaagattgccagcagcacagggtgacggtgttccagtacattggggagctgtgccgataccttgtcaaccagcccccgagcaaggcagaacgtggccataaggtccggctggcagtgggcagcgggctgcgcccagatacctgggagcgttttgtgcggcgcttcgggcccctgcaggtgctggagacatatggactgacagagggcaacgtggccaccatcaactacacaggacagcggggcgctgtggggcgtgcttcctggctttacaagcatatcttccccttctccttgattcgctatgatgtcaccacaggagagccaattcgggacccccaggggcactgtatggccacatctccaggtgagccagggctgctggtggccccggtaagccagcagtccccattcctgggctatgctggcgggccagagctggcccaggggaagttgctaaaggatgtcttccggcctggggatgttttcttcaacactggggacctgctggtctgcgatgaccaaggttttctccgcttccatgatcgtactggagacaccttcaggtggaagggggagaatgtggccacaaccgaggtggcagaggtcttcgaggccctagattttcttcaggaggtgaacgtctatggagtcactgtgccagggcatgaaggcagggctggaatggcagccctagttctgcgtcccccccacgctttggaccttatgcagctctacacccacgtgtctgagaacttgccaccttatgcccggccccgattcctcaggctccaggagtctttggccaccacagagaccttcaaacagcagaaagttcggatggcaaatgagggcttcgaccccagcaccctgtctgacccactgtacgttctggaccaggctgtaggtgcctacctgcccctcacaactgcccggtacagcgccctcctggcaggaaaccttcgaatctgagaacttccacacctgaggcacctgagagaggaactctgtggggtgggggccgttgcaggtgtactgggctgtcagggatcttttctataccagaactgcggtcactattttgtaataaatgtggctggagctgatccagctgtctctgacctacaaaaaaaaaaaaaaaaaa

SEQ ID NO: 1377 - protein, 730 aa, Homo sapien
MGVCQRTRAPWKEKSQLERAALGFRKGGSGMFASGWNQTVPIEEAGSMAALLLLPLLLLLPLLLLKLHLWPQLRWLPADLAFAVRALCCKRALRARALAAAAADPEGPEGGCSLAWRLAELAQQRAAHTFLIHGSRRFSYSEAERESNRAARAFLRALGWDWGPDGGDSGEGSAGEGERAAPGAGDAAAGSGAEFAGGDGAARGGGAAAPLSPGATVALLLPAGPEFLWLWFGLAKAGLRTAFVPTALRRGPLLHCLRSCGARALVLAPEFLESLEPDLPALRAMGLHLWAAGPGTHPAGISDLLAEVSAEVDGPVPGYLSSPQSITDTCLYIFTSGTTGLPKAARISHLKILQCQGFYQLCGVHQEDVIYLALPLYHMSGSLLGIVGCMGIGATVVLKSKFSAGQFWEDCQQHRVTVFQYIGELCRYLVNQPPSKAERGHKVRLAVGSGLRPDTWERFVRRFGPLQVLETYGLTEGNVATINYTGQRGAVGRASWLYKHIFPFSLIRYDVTTGEPIRDPQGHCMATSPGEPGLLVAPVSQQSPFLGYAGGPELAQGKLLKDVFRPGDVFFNTGDLLVCDDQGFLRFHDRTGDTFRWKGENVATTEVAEVFEALDFLQEVNVYGVTVPGHEGRAGMAALVLRPPHALDLMQLYTHVSENLPPYARPRFLRLQESLATTETFKQQKVRMANEGFDPSTLSDPLYVLDQAVGAYLPLTTARYSALLAGNLRI

SEQ ID NO: 1378 - DNA, 467 bp, Homo sapien
aaagaaaaatgctctgcatggattggagacacagcaataactactgttgccatggaagggttaacagtgtaggagctggtttatcagtccgctttgacatacagctaaaggaaatttatgtttgggggaaaaaggccctctgttcactttaaaattcagtgtggacttatgccaaagggggctgtttaagttgaaagaagccaagttaagtttggcctcttgcctggaatcacttgaattctgaaatttcactgcgacggacatgtgccttgtcacattttccattgcttaatcctgaagtttggtgcaagtctctctgcacctattaaaaagtgatgtatatacttccttcttattctgttgagttgtatagaattgtcttttgtatttaacactttgtaattttcacaatattttttaatttaaataaataaacacattttttccctcctgggaagtcatgaaaa

SEQ ID NO: 1379 - protein, 49 aa, Homo sapien
RKMLCMDWRHSNNYCCHGRVNSVGAGLSVRFDIQLKEIYVWGKKALCSL

SEQ ID NO: 1380 - DNA, 3655 bp, Homo sapien
agcgatccgaggcccggccccggccccgccccgcgccgcgccgcgccgcttgccgccgggctagcactgacgtgtctctcggcggagctgctgtgcagtggaacgcgctgggccgcgggcagcgtcgcctcacgcggagcagagctgagctgaagcgggacccggagcccgagcagccgccgccatggcaatcaaatttctggaagtcatcaagcccttctgtgtcatcctgccggaaattcagaagccagagaggaagattcagtttaaggagaaagtgctgtggaccgctatcaccctctttatcttcttagtgtgctgccagattcccctgtttgggatcatgtcttcagattcagctgaccctttctattggatgagagtgattctagcctctaacagaggcacattgatggagctagggatctctcctattgtcacgtctggccttataatgcaactcttggctggcgccaagataattgaagttggtgacaccccaaaagaccgagctctcttcaacggagcccaaaagttatttggcatgatcattactatcggccagtctatcgtgtatgtgatgaccgggatgtatggggacccttctgaaatgggtgctggaatttgcctgctaatcaccattcagctctttgttgctggcttaattgtcctacttttggatgaactcctgcaaaaaggatatggccttggctctggtatttctctcttcattgcaactaacatctgtgaaaccatcgtatggaaggcattcagccccactactgtcaacactggccgaggaatggaatttgaaggtgctatcatcgcacttttccatctgctggccacacgcacagacaaggtccgagcccttcgggaggcgttctaccgccagaatcttcccaacctcatgaatctcatcgccaccatctttgtctttgcagtggtcatctatttccagggcttccgagtggacctgccaatcaagtcggcccgctaccgtggccagtacaacacctatcccatcaagctcttctatacgtccaacatccccatcatcctgcagtctgccctggtgtccaacctttatgtcatctcccaaatgctctcagctcgcttcagtggcaacttgctggtcagcctgctgggcacctggtcggacacgtcttctgggggcccagcacgtgcttatccagttggtggcctttgctattacctgtcccctccagaatcttttggctccgtgttagaagacccggtccatgcagttgtatacatagtgttcatgctgggctcctgtgcattcttctccaaaacgtggattgaggtctcaggttcctctgccaaagatgttgcaaagcagctgaaggagcagcagatggtgatgagaggccaccgagagacctccatggtccatgaactcaaccggtacatccccacagccgcggcctttggtgggctgtgcatcggggccctctcggtcctggctgacttcctaggcgccattgggtctggaaccgggatcctgctcgcagtcacaatcatctaccagtactttgagatcttcgttaaggagcaaagcgaggttggcagcatgggggccctgctcttctgagcccgtctcccggacaggttgaggaagctgctccagaagcgcctcggaaggggagctctcatcatggcgcgtgctgctgcggcatatggacttttaataatgtttttgaatttcgtattctttcattccactgtgtaaagtgctagacattttccaatttaaaattttgctttttatcctggcactggcaaaaagaactgtgaaagtgaaattttattcagccgactgccagagaagtgggaatggtataggattgtccccaagtgtccatgtaacttttgttttaacctttgcaccttctcagtgctgtatgcggctgcagccgtctcacctgtttccccacaaagggaatttctcactctggttggaagcacaaacactgaaatgtctacgtttcattttggcagtagggtgtgaagctgggagcagatcatgtatttcccggagacgtgggaccttgctggcatgtctccttcacaatcaggcgtgggaatatctggcttaggactgtttctctctaagacaccattgttttcccttattttaaaagtgatttttttaaggacagaacttcttccaaaagagagggatggctttcccagaagacactcctggccatctgtggatttgtctgtgcacctattggctcttctagctgactcttctggttgggcttagagtctgcctgtttctgctagctccgtgtttagtccacttgggtcatcagctctgccaagctgagcctggccaagctaggtggacagacccttgcagtgatgtccgtttgtccagattctgccagtcatcactggacacgtctcctcgcagctgccctagcaaggggagacattgtggtagctatcagacatggacagaaactgacttagtgctcacaagcccctacaccttctgggctgaagatcacccagctgtgttcagaattttcttactgtgcttaggactgcacgcaagtgagcagacaccaccgacttcctttctgcgtcaccagtgtcgtcagcagagagaggacagcacaggctcaaggttggtagtgaagtcaggttcggggtgcatgggctgtggtggtgttgatcagttgctccagtgtttgaaataagaagactcatgtttatgtctggaataagttctgtttgtgctgacaggtggcctaggtcctggagatgagcaccctctctctggcctttagggagtcccctcttaggacaggcactgcccagcagcaagggcagcagagttgggtgctaagatcctgaggagctcgaggtttcgagctggctttagacattggtgggaccaaggatgttttgcaggatgccctgatcctaagaagggggcctgggggtgcgtgcagcctgtcggggagaccccactctgacagtgggcacacggcagcctgcaaagcacagggccaccgccacagcccggcagaggggcacactctggagaccttgctggcagtgctagccaggaaacagagtgaccaagggacaagaagggacttgcctaaagccacccagcaactcagcagcagaaccaagatgggccccaggctcctccatatggcccagggcttaccaccctatcacacgtggccttgtctagacccagtcctgagcaggggagaggctcttgagacctgatgccctcctacccacatggttctcccactgccctgtctgctctgctgctacagaggggcagggcctcccccagcccacgcttaggaatgcttgcctctggcaggcaggcagctgtacccaagctggtgggcagggggctggaaggcaccaggcctcaggaggagccccatagtcccgcctgcagcctgtaaccatcggctgggccctgcaaggcccacactcacgccctgtgggtgatggtcacggtgggtgggtgggggctgaccccagcttccaggggactgtcactgtggacgccaaaatggcataactgagataaggtgaataagtgacaaataaagccagttttttacaaggtaaaaaaaaaaaaaaaaaaaaa

SEQ ID NO: 1381 - protein, 476 aa, Homo sapien
MAIKFLEVIKPFCVILPEIQKPERKIQFKEKVLWTAITLFIFLVCCQIPLFGIMSSDSADPFYWMRVILASNRGTLMELGISPIVTSGLIMQLLAGAKIIEVGDTPKDRALFNGAQKLFGMIITIGQSIVYVMTGMYGDPSEMGAGICLLITIQLFVAGLIVLLLDELLQKGYGLGSGISLFIATNICETIVWKAFSPTTVNTGRGMEFEGAIIALFHLLATRTDKVRALREAFYRQNLPNLMNLIATIFVFAVVIYFQGFRVDLPIKSARYRGQYNTYPIKLFYTSNIPIILQSALVSNLYVISQMLSARFSGNLLVSLLGTWSDTSSGGPARAYPVGGLCYYLSPPESFGSVLEDPVHAVVYIVFMLGSCAFFSKTWIEVSGSSAKDVAKQLKEQQMVMRGHRETSMVHELNRYIPTAAAFGGLCIGALSVLADFLGAIGSGTGILLAVTIIYQYFEIFVKEQSEVGSMGALLF

SEQ ID NO: 1382 - DNA, 3262 bp, Homo sapien
agggggcgaaggcggcggtggtgaggaagatactttggttagtgaccacatcgcagcatgttgagtcaagtttaccgctgtgggttccagcccttcaaccaacatcttctgccctgggtcaagtgtacaaccgtcttcagatctcattgtatccagccttcagtcatcagacatgttcgttcttggagcaacatcccgtttatcactgtacccctcagtcgtacacatggaaagtccttcgcccaccgcagtgagctgaagcatgccaagagaatcgtggtgaagctcggcagtgccgtggtgacccgaggggatgaatgtggcctggccctggggcgcttggcatctattgttgagcaggtatcagtgctgcagaatcagggcagagagatgatgctggtgaccagtggagccgtagcctttggcaaacaacgcttgcgccatgagatccttctgtctcagagcgtgcggcaggccctccactcggggcagaaccagctgaaagaaatggcaattccagtcttagaggcacgagcctgtgcagctgccggacagagtgggctgatggccttgtatgaggctatgtttacccagtacagcatctgtgctgcccagattttggtgaccaatttggatttccatgatgagcagaagcgccggaacctcaatggaacacttcatgaactccttagaatgaacattgtccccattgtcaacacaaatgatgctgttgtccccccagctgagcccaacagtgacctgcagggggtaaatgttattagtgttaaagataatgatagcctggctgcccgactggctgtggaaatgaaaactgatctcttgattgttctttcagatgtagaaggcctttttgacagccccccaggttcagatgatgcaaagcttattgatatattttatcccggagatcagcagtctgtgacatttggaaccaagtctagagtgggaatgggtggcatggaagccaaggtgaaagcagccctctgggctttgcaaggtggcacttctgttgttattgccaatggaacccacccaaaggtgtctgggcacgtcatcacagacattgtggaggggaagaaagttggtaccttcttttcagaagtaaagcctgcaggccctactgttgagcagcagggagaaatggcgcgatctggaggaaggatgttggccaccttggaacctgagcagagagcagaaattatccatcatctggctgatctgttgacggaccagcgtgatgagatcctgttagccaacaaaaaagacttggaggaggcagaggggagacttgcagctcctctgctgaaacgtttaagcctctccacatccaaattgaacagcctggccatcggtctgcgacagatcgcagcctcctcccaggacagcgtgggacgtgttttgcgccgcacccgaatcgccaaaaacttggaactggaacaagtgactgtcccaattggagttctgctggtgatctttgaatctcgtcctgactgtctaccccaggtggcagctttggctatcgcaagtggcaatggcttgttactcaaaggagggaaggaggctgcacacagcaaccggattctccacctcctgacccaggaggctctctcaatccatggagtcaaggaggccgtgcaactggtgaataccagagaagaagttgaagatctttgccgcctagacaaaatgatagatctgatcattccacgtggctcttcccagctggtcagagacatccagaaagctgctaaggggattccagtgatggggcacagcgaagggatctgtcacatgtatgtggattccgaggccagtgttgataaggtcaccaggctagtcagagactctaaatgtgaatatccagctgcctgtaatgctttggagactttgttaatccaccgggatctgctcaggacaccattatttgaccagatcattgatatgctgagagtggaacaggtaaaaattcatgcaggccccaaatttgcctcctatctgaccttcagcccctccgaagtgaagtcactccgaactgagtatggggacctggaattatgcattgaagtagtggacaacgttcaggatgccattgaccacatccacaagtatggcagctcccacacggatgtcatcgtcacagaggacgaaaacacagcggagttcttcctgcagcacgtagacagtgcctgtgtgttctggaatgccagcactcgcttttctgatggttaccgctttggactgggagctgaagtgggaatcagtacatcgagaatccacgcccggggaccagtaggacttgagggactgcttactactaagtggctgctgcgagggaaggaccacgtggtctcagatttctcagagcatggaagtttaaaatatcttcatgagaacctccctattcctcagagaaacaccaactgaaaagagccaggaaaacccgggaattttccaaaaggtcttcacgttaaacttgtcttatctcaggagagagcccgctcttgtctcccagttcctggtagggtctgcctgttggaaagtgtacctggatgcttctgggctccgtttggcaatagcaatcttggctgatgtgcacagtctggctcccagctcaccctttttttttaaagtaagaaaatagttgctaccgatagggactttgccaagtccaattatcttctaggattgaaaggtgcattttccccataaaaaaggcgaggaaaacccatggctgctttgtgtcacctcagtgacttacagtcccccttcgcatttagttggtactagagccagtcatccttaacaaatcttttcgcgttttatttctttcacatgtagtcatcttcaaaaaggaaagatttggaattttagaaaaggggcaactcttctttttagcattctcatcagaaagtcacaaaaatcgatggaatcatttccactgggaagattgaccttttgtatttatttgtggggtaaattaataagcattccagatgcttgcagcttcctgcatccaggagatgctgtgtcccccgtgatgcagctggaacccaagctgcagcaggagatgcaagtttcaggatgttccccactgagctggaggaatatctacagcagtgatgcttgaaatttttgtatgaattattttgtcgtcctacccttttcctccaaaacaaaaattagaggattattttaatactttggattcttcccccttttttgagaaataaagttttttatg

SEQ ID NO: 1383 - protein, 795 aa, Homo sapien [sequence omitted]

SEQ ID NO: 1384 - DNA, 2056 bp, Homo sapien
gagaggcgcccaggcggcggcggcggcggcccagcttcttctttcctcgcacagccaggcggcccctgctcgagtcccgcgtcgccatggccgcggttcccgagttgctgcagcagcaggaggaggaccgcagcaagctgagatctgtatctgtggacctgaatgttgatccctcgcttcagattgacatacctgatgcgctcagtgagagagacaaagtcaaatttacagtgcacacaaagaccacactgcccacgtttcagagcccagagttttctgttacaaggcaacatgaagactttgtgtggctacatgacactcttattgaaacaacagactatgctgggcttattattccacctgctcctacgaagcccgactttgatggtcctcgagagaagatgcagaaactgggagaaggtgaagggtctatgaccaaagaagaatttgccaagatgaaacaagaactggaagctgagtatctcgctgtgtttaagaagactgtgtcctcccatgaagtctttcttcagcggctttcttctcaccctgttctcagtaaagatcgcaactttcatgttttcctggaatatgatcaggatctaagtgttaggcggaaaaatactaaagagatgtttggtggcttcttcaaaagtgtggtgaaaagtgctgatgaagtcctttttactggagttaaggaggtagatgacttctttgagcaagagaagaacttccttattaactattacaataggatcaaagattcttgtgtgaaagctgacaaaatgaccagatctcataaaaatgttgccgatgactatatccacaccgcagcctgcttacatagcctggctttagaagagcccacagtcatcaaaaagtacctattgaaggttgctgagctatttgaaaaactaaggaaagtagagggtcgagtttcatcagatgaagatttgaagctaacagagctcctccgatactacatgctcaacattgaagctgctaaggatctcttatacagacgcaccaaagccctcattgactatgagaactcaaacaaagctctggataaggcccggttaaagagcaaagacgtcaagttggctgaggcacaccagcaggagtgctgccagaaatttgaacaactttccgaatctgcaaaagaagaactgataaatttcaaacggaagagagtggcagcatttagaaagaatctaattgaaatgtctgaactggaaataaaacatgccaggaacaatgtctcccttttgcagagctgtattgacttgttcaagaataactgatatgccttcactcagaagaaaagaaatgaatgtgaaagaaagccaagcatcacttgcacttaaatcattaccacggaagatatattagcttcaactttagtttaaaattatgtgaataaatattttgatttctacaaatcttaacatttaaccatgttggtttaaaaatattattgcttgctacttggacataactaatttttccttgtgcatttaatacctctgggcagaatccaaatactgggttctcccgtagttcgtctttagttactaagaaagggtgtaggacacattagccttctggaaacaagtagaagccatcacctggcccatgtccctacaaacccatgattgtcagggaggtgccagttacagcaggtgattcagctacttgaggtcggtaacagaccttccattcctcactgaaggtggggtttgtgtttttgttttgccctgttactccactggtagtcatctggtgtttgtactataacaacagcaagaaaatctcatttatctttatatactctttgcacctcctttttttagtcgagatataaatatttgaggggagagaaatatctacaggtatatatggaaacaaataatgtggtctgctttataagatggccagatctacattaggaaaagtataagccccctccctaatggccgctggggggtgagggcggtgtgttgtatgtctttgggtgtttgtttttttataaagcatataataaaataatcgtgctact

SEQ ID NO: 1385 - protein, 404 aa, Homo sapien
MAAVPELLQQQEEDRSKLRSVSVDLNVDPSLQIDIPDALSERDKVKFTVHTKTTLPTFQSPEFSVTRQHEDFVWLHDTLIETTDYAGLIIPPAPTKPDFDGPREKMQKLGEGEGSMTKEEFAKMKQELEAEYLAVFKKTVSSHEVFLQRLSSHPVLSKDRNFHVFLEYDQDLSVRRKNTKEMFGGFFKSVVKSADEVLFTGVKEVDDFFEQEKNFLINYYNRIKDSCVKADKMTRSHKNVADDYIHTAACLHSLALEEPTVIKKYLLKVAELFEKLRKVEGRVSSDEDLKLTELLRYYMLNIEAAKDLLYRRTKALIDYENSNKALDKARLKSKDVKLAEAHQQECCQKFEQLSESAKEELINFKRKRVAAFRKNLIEMSELEIKHARNNVSLLQSCIDLFKNN

SEQ ID NO: 1386 - DNA, 2730 bp, Homo sapien
gccgcgcgctgtgtctccgctgcgtccgccgaggcccccgagtgtcagggacaaaagcctccgcctgctcccgcagccggggctcatctgccgccgccgccgcgctgaggagagttcgccgccgtcgccgcccgtgaggatctgagagccatgtcggccagcagcctcttggagcagagaccaaaaggtcaaggaaacaaagtacaaaatggatctgtacatcaaaaggatggattaaacgatgatgattttgaaccttacttgagtccacaggcaaggcccaataatgcatatactgccatgtcagattcctacttacccagttactacagtccctccattggcttctcctattctttgggtgaagctgcttggtctacggggggtgacacagccatgccctacttaacttcttatggacagctgagcaacggagagccccacttcctaccagatgcaatgtttgggcaaccaggagccctaggtagcactccatttcttggtcagcatggttttaatttctttcccagtgggattgacttctcagcatggggaaataacagttctcagggacagtctactcagagctctggatatagtagcaattatgcttatgcacctagctccttaggtggagccatgattgatggacagtcagcttttgccaatgagaccctcaataaggctcctggcatgaatactatagaccaagggatggcagcactgaagttgggtagcacagaagttgcaagcaatgttccaaaagttgtaggttctgctgttggtagcgggtccattactagtaacatcgtggcttccaatagtttgcctccagccaccattgctcctccaaaaccagcatcttgggctgatattgctagcaagcctgcaaaacagcaacctaaactgaagaccaagaatggcattgcagggtcaagtcttccgccacccccgataaagcataacatggatattggaacttgggataacaagggtcccgttgcaaaagccccctcacaggctttggttcagaatataggtcagccaacccaggggtctcctcagcctgtaggtcagcaggctaacaatagcccaccagtggctcaggcatcagtagggcaacagacacagccattgcctccacctccaccacagcctgcccagctttcagtccagcaacaggcagctcagccaacccgctgggtagcacctcggaaccgtggcagtgggttcggtcataatggggtggatggtaatggagtaggacagtctcaggctggttctggatctactccttcagaaccccacccagtgttggagaagcttcggtccattaataactataaccccaaagattttgactggaatctgaaacatggccgggttttcatcattaagagctactctgaggacgatattcaccgttccattaagtataatatttggtgcagcacagagcatggtaacaagagactggatgctgcttatcgttccatgaacgggaaaggccccgtttacttacttttcagtgtcaacggcagtggacacttctgtggcgtggcagaaatgaaatctgctgtggactacaacacatgtgcaggtgtgtggtcccaggacaaatggaagggtcgttttgatgtcaggtggatttttgtgaaggacgttcccaatagccaactgcgacacattcgcctagagaacaacgagaataaaccagtgaccaactctagggacactcaggaagtgcctctggaaaaggctaagcaggtgttgaaaattatagccagctacaagcacaccacttccatttttgatgacttctcacactatgagaaacgccaaagaggaagaagaaagtgttaaaaaggaacgtcaaggtcgtgggaaataaaaggcagttctacacagactgcagcaacggttgcatctgcatatcctaagaggaaaaaatgaccttcaagagaattaggacttttttcttaatttcactgacttcagagacgattgcagacttgcagtttaagtattggaatttcacaaaagacataggacttaactggaaaatgaaaagaaaagaaaaagaaaaaactaaacaaaaaatccctctaggtagtttaggtgaaaaatgtcccttttattttggctttggttgtgatttcagagcataatgctatgttttttgtctttttactatgtttttcggatttttaagtccgtaagtgcatacagttttctctaatttttaaaccctttcctcctcccatttggacatttgcacttggagaacacttgagttgtgaaggttttgggcatccaccccagaaagtgggaatttgattttatccttccgaactggaagaacatttttatgaagaatttttgtctaggagaatataacagtgttacccaaggttgtgtctttaagggtggttcattttctctgaccttttgttactcaaagtaaagtactaggagtcctaagaaatgttctgttcttgtacattatactgattaagtcaggattaatttgatttcaaagctgagaacagtggtaaaaactcgtttacagaaatgcattttggaagagaaaaatactgtaaaacgtgtcgtgaatgtttcttcagtttcttgttcagccaatgaggaaagggcattgcctttctttttaccattaatcacttctcaataaacgtgagatcctgttgagcatcaaaaaaaaaaaaaaaaaaa

SEQ ID NO: 1387 - protein, 570 aa, Homo sapien
MSASSLLEQRPKGQGNKVQNGSVHQKDGLNDDDFEPYLSPQARPNNAYTAMSDSYLPSYYSPSIGFSYSLGEAAWSTGGDTAMPYLTSYGQLSNGEPHFLPDAMFGQPGALGSTPFLGQHGFNFFPSGIDFSAWGNNSSQGQSTQSSGYSSNYAYAPSSLGGAMIDGQSAFANETLNKAPGMNTIDQGMAALKLGSTEVASNVPKVVGSAVGSGSITSNIVASNSLPPATIAPPKPASWADIASKPAKQQPKLKTKNGIAGSSLPPPPIKHNMDIGTWDNKGPVAKAPSQALVQNIGQPTQGSPQPVGQQANNSPPVAQASVGQQTQPLPPPPPQPAQLSVQQQAAQPTRWVAPRNRGSGFGHNGVDGNGVGQSQAGSGSTPSEPHPVLEKLRSINNYNPKDFDWNLKHGRVFIIKSYSEDDIHRSIKYNIWCSTEHGNKRLDAAYRSMNGKGPVYLLFSVNGSGHFCGVAEMKSAVDYNTCAGVWSQDKWKGRFDVRWIFVKDVPNSQLRHIRLENNENKPVTNSRDTQEVPLEKAKQVLKIIASYKHTTSIFDDFSHYEKRQRGRRKC

SEQ ID NO: 1388 - DNA, 3294 bp, Homo sapien
gtgaagagaggcgcggcgtgactgagctacggttctggctgcgtcctagaggcatccggggcagtaaaaccgctgcgatcgcggaggcggcggccaggccgagaggcaggccgggcaggggtgtcggacgcagggcgctgggccgggtttcggcttcggccacagctttttttctcaaggtgcaatgaaagccttccacactttctgtgttgtccttctggtgtttgggagtgtctctgaagccaagtttgatgattttgaggatgaggaggacatagtagagtatgatgataatgacttcgctgaatttgaggatgtcatggaagactctgttactgaatctcctcaacgggtcataatcactgaagatgatgaagatgagaccactgtggagttggaagggcaggatgaaaaccaagaaggagattttgaagatgcagatacccaggagggagatactgagagtgaaccatatgatgatgaagaatttgaaggttatgaagacaaaccagatacttcttctagcaaaaataaagacccaataacgattgttgatgttcctgcacacctccagaacagctgggagagttattatctagaaattttgatggtgactggtctgcttgcttatatcatgaattacatcattgggaagaataaaaacagtcgccttgcacaggcctggtttaacactcatagggagcttttggagagcaactttactttagtgggggatgatggaactaacaaagaagccacaagcacaggaaagttgaaccaggagaatgagcacatctataacctgtggtgttctggtcgagtgtgctgtgagggcatgcttatccagctgaggttcctcaagagacaagacttactgaatgtcctggcccggatgatgaggccagtgagtgatcaagtgcaaataaaagtaaccatgaatgatgaagacatggatacctacgtatttgctgttggcacacggaaagccttggtgcgactacagaaagagatgcaggatttgagtgagttttgtagtgataaacctaagtctggagcaaagtatggactgccggactctttggccatcctgtcagagatgggagaagtcacagacggaatgatggatacaaagatggttcactttcttacacactatgctgacaagattgaatctgttcatttttcagaccagttctctggtccaaaaattatgcaagaggaaggtcagcctttaaagctacctgacactaagaggacactgttgtttacatttaatgtgcctggctcaggtaacacttacccaaaggatatggaggcactgctacccctgatgaacatggtgatttattctattgataaagccaaaaagttccgactcaacagagaaggcaaacaaaaagcagataagaaccgtgcccgagtagaagagaacttcttgaaactgacacatgtgcaaagacaggaagcagcacagtctcggcgggaggagaaaaaaagagcagagaaggagcgaatcatgaatgaggaagatcctgagaaacagcgcaggctggaggaggctgcattgaggcgtgcaaaaaagaagttggaaaagaagcaaatgaaaatgaaacaaatcaaagtgaaagccatgtaaagccatcccagagatttgagttctgatgccacctgtaagctctgaattcacaggaaacatgaaaaacgccagtccatttctcaaccttaaatttcagacagtcttgggcaactgagaaatccttatttcatcatctactctgtttggggtttggggttttacagagattgaagatacctggaaagggctctgtttcaagaatttttttttccagataatcaaattattttgattattttataaaaggaatgatctatgaaatctgtgtaggttttaaatattttaaaaattataatacaaatcatcagtgcttttagtacttcagtgtttaaagaaataccatgaaatttataggtagataaccagattgttgctttttgtttaaaccaagcagttgaaatggctataaagactgactctaaaccaagattctgcaaataatgattggaattgcacaataaacattgcttgatgttttcttgtatgtctacattaaacttgagaaaaagtaaaaattagaacactgtatgtagtaatgaaatttcagggacccagaacataatgtagtatatgtttttaggtgggagatgctgataacaaaattaataggaagtctgtaggcattaggatactgacatgtacatggaaaattctagggacaggagcatcattttttccttacctgataccacgaaccagtgacaacgtgaatgctgtattttaagtggttgtatgtttattttcttgagtaacaaatgcatgaaaaattaatgcttcacctaggtaagatcattggtctgtgtgaaatcacaaatgttttttccttcttggttgctgcagcctgggtggatgttcatggagaagctctgttctctatattatggctgtgtgccgttgcttctccctctgcttttatcttttccacagttgaggctgggtatgttctttcaaagaaatggccatgaatatgtgtaagtatacttttgaaaatgagctttcctaaactattgagagttctttccacctcttgcggaaccaactcttggaggagaggcccatgtatctgcacgagcacttagcttgttcagatctctgcattttataaatgcttcttaccaagaaagcatttttaggtcattgcttgtaccaggtaatttttgccggggatgggtaagggttgggttttctggtgggagtggggtggtgggtattttttgttgatgctttagtgcaggcctgttctgaggcaataacaagttgctgtgaaaacagcatgtgctgctgcctttgtaactgcatggaaacttttcacatgggtttttctccaagttaatacagaaatatgtaaactgagagatgcaaatgtaatatttttaacagttcatgaagttgttattaaaataactaacataaaacttaattactttaatattatataattatagtagtggccttgttttacaaacctttaaattacattttagaaatcaaagttgatagtcttagttatcttttgagtaagaaaagctttcctaaagtcccatacatttggaccatggcagctaattttgtaacttaagcattcatatgaactacctatggacatctattaaagtgattgacaaaatctcaaaaaaaaaaaaaaaaaaaaaaaaaaa

SEQ ID NO: 1389 - protein, 483 aa, Homo sapien
MKAFHTFCVVLLVFGSVSEAKFDDFEDEEDIVEYDDNDFAEFEDVMEDSVTESPQRVIITEDDEDETTVELEGQDENQEGDFEDADTQEGDTESEPYDDEEFEGYEDKPDTSSSKNKDPITIVDVPAHLQNSWESYYLEILMVTGLLAYIMNYIIGKNKNSRLAQAWFNTHRELLESNFTLVGDDGTNKEATSTGKLNQENEHIYNLWCSGRVCCEGMLIQLRFLKRQDLLNVLARMMRPVSDQVQIKVTMNDEDMDTYVFAVGTRKALVRLQKEMQDLSEFCSDKPKSGAKYGLPDSLAILSEMGEVTDGMMDTKMVHFLTHYADKIESVHFSDQFSGPKIMQEEGQPLKLPDTKRTLLFTFNVPGSGNTYPKDMEALLPLMNMVIYSIDKAKKFRLNREGKQKADKNRARVEENFLKLTHVQRQEAAQSRREEKKRAEKERIMNEEDPEKQRRLEEAALRRAKKKLEKKQMKMKQIKVKAM

SEQ ID NO: 1390 - DNA, 3618 bp, Homo sapien
ggcacgagcgaggttcgggctggttgttccgttgcgagctgcagctgcgatctctgtggtaggcccagaagtgtatgctgacttgtaaagtgaagaagccagtggtgctgcgggtgttcttttggggtagtgtctgggatccagtacgagttgaatcattgttcaaataaggtgtaattgaaaagtgatcctctcttcagagatgtcaaaaacaaacaaatccaagtctggatctcgctcttctcgctcaagatctgcatcaagatctcgttctcgttcattttcgaagtctcggtcccgaagccgatctctctctcgttcaaggaagcgcaggctgagttctaggtctcgttccagatcatattctccagctcataacagagaaagaaaccacccaagagtatatcagaatcgggatttccgaggtcacaacagaggctatagaaggccctattatttccgtgggcgtaacagaggcttttatccatggggccaatataaccgaggaggctatggaaactaccgctcaaattggcagaattaccggcaagcatacagtcctcgtcgaggccgttcaagatcccggtccccaaagagaaggtccccttcaccaaggtccaggagccattctagaaactctgataagtcgtcttctgaccggtcaaggcgctcctcatcctcccgttcttcctccaaccatagccgagttgaatcttctaagcgcaagtctgcaaaggagaaaaagtcctcttctaaggatagccggccatctcaggctgccggggataaccagggagatgaggtcaaggagcagacattctctggaggcacctctcaagatacaaaagcatctgagagctcgaagccatggccagatgccacctacggcactggttctgcatcacgggcctcagcagtttctgagctgagtcctcgggagcgaagcccagctctcaaaagccccctccagtctgtggtggtgaggcggcggtcaccccgtcctagccccgtgccaaaacctagtcctccactttccagcacatcccagatgggctcaactctgccgagtggtgccgggtatcagtctgggacacaccaaggtcagttcgaccatggttctgggtccctgagtccatccaaaaagagccctgtgggtaagagtccaccatccactggctccacatatggctcatctcagaaggaggagagtgctgcttcaggaggagcagcctatacaaagaggtatctagaagagcagaagacagagaatggaaaagataaggaacagaaacaaacaaataccgataaagaaaaaataaaagagaaagggagcttctctgacacaggcttgggtgatggaaaaatgaaatctgattcttttgctcccaaaactgattctgagaagccttttcggggcagtcagtctcccaaaaggtataagctccgagatgactttgagaagaagatggctgacttccacaaggaggagatggatgatcaagataaggacaaagctaagggaagaaaggaatctgagtttgatgatgaacccaaatttatgtctaaagtcataggtgcaaacaaaaaccaggaggaggagaagtcaggcaaatgggagggcctggtatatgcacctccagggaaggaaaagcagagaaaaacagaggagctggaggaggagtctttcccagagagatccaaaaaggaagatcggggcaagagaagcgaaggtgggcacaggggctttgtgcctgagaagaatttccgagtgactgcttataaagcagtccaggagaaaagctcatcacctcccccaagaaagacctctgagagccgagacaagctgggagcgaaaggagattttcccacaggaaagtcttccttttccattactcgagaggcacaggtcaatgtccggatggactcttttgatgaggacctcgcacgacccagtggcttattggctcaggaacgcaagctttgccgagatctagtccatagcaacaaaaaggaacaggagtttcgttccattttccagcacatacaatcagctcagtctcagcgtagcccctcagaactgtttgcccaacatatagtgaccattgttcaccatgttaaagagcatcactttgggtcctcaggaatgacattacatgaacgctttactaaatacctaaagagaggaactgagcaggaggcagccaaaaacaagaaaagcccagagatacacaggagaatagacatttcccccagtacattcagaaaacatggtttggctcatgatgaaatgaaaagtccccgggaacctggctacaaggctgagggaaaatacaaagatgatcctgttgatctccgccttgatattgaacgtcgtaaaaaacataaggagagagatcttaaacgaggtaaatcgagagaatcagtggattcccgagactccagtcactcaagggaaaggtcagctgaaaaaacagagaaaactcataaaggatcaaagaaacagaagaagcatcggagagcaagagacaggtccagatcctcctcctcttcctcccagtcatctcactcctacaaagcagaagagtacactgaagagacagaggaaagagaggagagcaccacgggctttgacaaatcaagactggggaccaaagactttgtgggtccaagtgaaagaggaggtggcagagctcgaggaacctttcagtttcgagccagaggaagaggctggggcagaggcaactactctgggaacaataacaacaacagcaacaacgattttcaaaaaagaaaccgggaagaggagtgggacccagagtacacacccaaaagcaagaagtattacttgcatgatgaccgtgaaggcgaaggcagtgacaagtgggtgagccggggccggggccgaggagcctttcctcggggtcggggccggttcatgttccggaaatcaagtaccagccccaagtgggcccatgacaagttcagtggggaggaaggggagattgaagacgacgagagtgggacagagaaccgagaagagaaggacaatatacagcccacaaccgagtaggggccacccttgacgggattcctgcccaggggagagaggcgctgggaagatggctggtgaggagcttaacagaggaacctcaagaagattctgaaaatcctacccccaccccccaccagccgcacagattgtactaccgcgagaggcatccctggcgctgtctcccactggacagaggaggctggccatggggcccaggggtcaggcccagcttttgagcagaatacaacgcattgggctttagctgtttttctcatttgttggtgtgtggggtgggggcaggggtagggcgggagagcgatgcttggatttttgtttcctattagaaaccaacagttttgttctaatttcatttcatttggagctaagatgactaatttgatgattttcgatctcttttcccctgtcctgattttaaaagccccctccttttttttttttttttttctttttttaggcatatgtagtaatattagaaacatttaatttgggaaactttgattcttgaaagagaaaacaaaagcatgtgaataaactttgctcgtgcc

SEQ ID NO: 1391 - protein, 955 aa, Homo sapien
MSKTNKSKSGSRSSRSRSASRSRSRSFSKSRSRSRSLSRSRKRRLSSRSRSRSYSPAHNRERNHPRVYQNRDFRGHNRGYRRPYYFRGRNRGFYPWGQYNRGGYGNYRSNWQNYRQAYSPRRGRSRSRSPKRRSPSPRSRSHSRNSDKSSSDRSRRSSSSRSSSNHSRVESSKRKSAKEKKSSSKDSRPSQAAGDNQGDEVKEQTFSGGTSQDTKASESSKPWPDATYGTGSASRASAVSELSPRERSPALKSPLQSVVVRRRSPRPSPVPKPSPPLSSTSQMGSTLPSGAGYQSGTHQGQFDHGSGSLSPSKKSPVGKSPPSTGSTYGSSQKEESAASGGAAYTKRYLEEQKTENGKDKEQKQTNTDKEKIKEKGSFSDTGLGDGKMKSDSFAPKTDSEKPFRGSQSPKRYKLRDDFEKKMADFHKEEMDDQDKDKAKGRKESEFDDEPKFMSKVIGANKNQEEEKSGKWEGLVYAPPGKEKQRKTEELEEESFPERSKKEDRGKRSEGGHRGFVPEKNFRVTAYKAVQEKSSSPPPRKTSESRDKLGAKGDFPTGKSSFSITREAQVNVRMDSFDEDLARPSGLLAQERKLCRDLVHSNKKEQEFRSIFQHIQSAQSQRSPSELFAQHIVTIVHHVKEHHFGSSGMTLHERFTKYLKRGTEQEAAKNKKSPEIHRRIDISPSTFRKHGLAHDEMKSPREPGYKAEGKYKDDPVDLRLDIERRKKHKERDLKRGKSRESVDSRDSSHSRERSAEKTEKTHKGSKKQKKHRRARDRSRSSSSSSQSSHSYKAEEYTEETEEREESTTGFDKSRLGTKDFVGPSERGGGRARGTFQFRARGRGWGRGNYSGNNNNNSNNDFQKRNREEEWDPEYTPKSKKYYLHDDREGEGSDKWVSRGRGRGAFPRGRGRFMFRKSSTSPKWAHDKFSGEEGEIEDDESGTENREEKDNIQPTTE

SEQ ID NO: 1392 - DNA, 2535 bp, Homo sapien
ctgggggcggggcaggggcaggtgtagcctctgtgcctcgttgtcccctggcgctacccggacatctctcagggtgccggcaccatgaagatctggacttcggagcacgtctttgaccacccgtgggaaactgttacaacagctgcaatgcagaaatacccaaaccctatgaacccaagtgtggttggagttgatgtgttggacagacatatagatccctctggaaagttgcacagccacagacttctcagcacagagtggggactgccttccattgtgaagtctcttattggtgcagcaagaacgaaaacatatgtgcaagaacattctgtagttgatcctgtagagaaaacaatggaacttaaatctactaatatttcatttacaaacatggtttcagtagatgagagacttatatacaaaccacatcctcaggatccagaaaaaactgttttgacacaagaagccataattaccgtgaaaggagttagcctcagcagttaccttgaaggactgatggcaagtacgatatcctcaaatgctagtaaaggccgagaagcaatggaatgggtaatacataaattaaatgctgagattgaagaactgacagcctcagcaagaggaaccataaggactccaatggcagcagcagcgttttgcagagaagtgatcgtgacagttggtagacaacatcgggtactccaggtctctccaaactgactatatatttatttgttattttaaaaatacaactatattttgggtagttttttttttttttttttttgataagttggtgtaaggctatgtgacttgatcaaaacagatgcagggcctctaaataaaagggatcatctgaaattaatgttgtttgaaattactatctgattttgagggttccagtatttctgtgaaaattcaacaagaactccttggaaactggtattgatattcagtctccttaaggtagatttttcaagcttttcatacattggaactccacctgactttggaccaaccccagaacagagcagagccacctcctatagacgcccattgccctgctgctgtacacttcagcagcttgcacaagggagctcacttaaaaggagaaattgtgtagttttaaaatatattttgtgtaaaataccttactatgctataaaccaccattaaaaaccagtgttttgatttggtacttaaatatttttggagtgaaaattatcactaaagtaacatgactccaacaaaagtatggtttcattataaaagagtactgtattgatttgcccaagttttgtaacttagtaaaggtattaacttccttggatttgtactttgtgatttagtatgctgtatcgtgggctggttatgttaactgaaaaaaataaagtcattacctgagttttgcagtgctctaacttaaacagaagaacagctgttcacatcttttagcattttacatttgcctaacttaaaaattgccatgtgtcaaaatcatggttttgtaattgctaaggcatgatatgtcaggttatttgaatataattactttttgaagtaattgtgaccacaaaacatcttttttacatgaaggagctgtgtatcatttgaaattactcaaatgatgtcttgctctgaggcataaatcccaggtacttagtgtttttaataatatggtgccactgcaggatttgggggcggtggggaagaacaagcataatggtagggggaggcttggcctgaaactaaccactgagtgaattgcactgcaggttttacttaacgggaattccttatttgggatgtcaagagggcagctgcaaactgaaaaacaatccagtaaatgtactttgttttatgtattgtagcaggcaattaactactaaataatagctttgacatttgcaattgttgcatagagactatttttgctagaagatgattagctcttgcctttattttacagtgcttagtgtgataaacttctagtcatgtttcctatccaagagaccagttaatatatgtacataaaccacagaaatagtataacacactatttttaaattatcgttttcctacttaaattttgtttagcttaagacttcttaggacatttgtaaaagcaggttaaatttaataaggtttctgatttttttttgtaaccggagatagtttttacaagtgaaataacatttcagctaaataaaacatcgctaaataattgatatttgatgaaaatctgctttgtataatttctgtaaattatccttgttctgaaaaaggtgtaatgccctaatatttttaaatccttatcctttgattttttaaaaactgacctattgataaaactataaattttcattttccagtgcagttagttacctttttaaacataaatgcacaacaagcaaatgaatttaagagaactaaactggaataagtgttcataaatgaaacccttggactatttaataaagttgaaatgtgaattaaggaaaacttttgttaataaaaactttcttttaaaaaaaa

SEQ ID NO: 1393 - protein, 211 aa, Homo sapien
MKIWTSEHVFDHPWETVTTAAMQKYPNPMNPSVVGVDVLDRHIDPSGKLHSHRLLSTEWGLPSIVKSLIGAARTKTYVQEHSVVDPVEKTMELKSTNISFTNMVSVDERLIYKPHPQDPEKTVLTQEAIITVKGVSLSSYLEGLMASTISSNASKGREAMEWVIHKLNAEIEELTASARGTIRTPMAAAAFCREVIVTVGRQHRVLQVSPN

SEQ ID NO: 1394 - DNA, 2944 bp, Homo sapien
atatgatccgctcggcttcctgggtctggctgctgccgcccgccggtgtccgcccgtgtcgcgccggggcaccaaggagccgttggagggtccgggcggaggcccgctcgtgtggaagtcgtcgacgccgccgctcgtccgtcctcccgtccgttctcgctcccggccgccatcatgctggcgctcatctcccgcctgctggactggttccgttcgctcttctggaaggaagagatggagctgacgctcgtggggctgcagtactcgggcaagaccaccttcgtcaatgtcatcgcgtcaggtcaattcagtgaagatatgatacccacagtgggcttcaacatgaggaaggtaactaaaggtaacgtcacaataaagatctgggacataggaggacaaccccgatttcgaagcatgtgggagcggtattgcagaggagtcaatgctattgtttacatgatagatgctgcagatcgtgaaaagatagaagcttcccgaaatgagctacataatcttctagataaaccacagttacaaggaattccagtgctagtgcttggaaacaagagagatcttcctaatgccttggatgagaaacagctaattgaaaaaatgaatctgtctgctattcaggatagagaaatttgctgctattcaatttcttgcaaagaaaaggataatatagatatcacacttcagtggcttattcagcattcaaaatctagaagaagctgaagcatctcttgaagtcttccagtccttcttggctataatcctagaattattgtccgttcctctgaagtaattcccagaatacggtccttcctaaaccccagaaattgcctttttcagagtctatttctcatgtgcactgctgaagatgaatatccctaatccttcataaagaatcagctagagttgtcatgataaagtcagcacacacaaaaaggcttcttacacataccaaaaaaaatgtcttaaaccatgtgtagagctttaaaaacagaaaaaaaaccccatatacttatgaccatcttaaatcaagaaaattgcatatttccattctggtctttctgggccagatttttatattggttttcagtaaatgtctatctataatatttcattatagagtccagtagcttaatactgacactgacttgatacagcacgaagtttctagtgccacacacagtatttagaaaacctttaggcgtgaatgactcatgtgggatatatgtaaacataatgtttattttatctcacaaatgcatgtgaaatgtataattacatcttaggaatccaaaatggtctgcagagagtgagcggaggcaccagatcaatgttggttctttgcactggtgagattctgcctgatgaatattaaagatatcctgctttctgagaactctatcaccagatggcagttgggatatgggaggaactaaagcatcctgttttgtatctgtccagatcattatttctgtctcttgttttttcttcctggttcaggatacttttttaaggggttgagaattgaagattttccaaaagcgttcatgaatttagagcattccacccaatataataaaacctgttaagaatgtcagtctttgttcaaacatctgtttgttctatctccagtcattaaatcagtgctgctgcatgacactcttaactcctgactttttatatccagtcataaagttgactttcagcacaaaagatacttataaacaaataaaaaatttttatttttctctcttactgatgtaagctttggcactcttttgactggtgccattagacatcttgattattgtgacaactctagacctgcctgctttatctaatgtaatcatgctcaatgtctacaggttgtttaataatcagtcacacagagaactgaggaactgatgctgtttgtttgcttctatgatacagagatgtctaaaaacttcaaatggacatgttttgtagtttagcgacttccgtatacataaagggacatattaatactggttcatttgtaaattattattcatatagaccactgtagtagataaaactctatggtacacctgcttatgtgttgcctcacactgtgtgtgattttgtttcttttgttaagcagcacttatgtagactgcatttccaaatgtgttgagcactcggagtgtagtcaacagtaagttcttttaatgaatatcagttttaatttatagactgccatggccttaaaaatattctgtacaatatactgcactgtgttgcacagacactacttgcttttctccattcatatttttatgagtagaatctgggcttttaaatttctcttcttattctttgaagcatgttgcatactaccctggtgggatggatggttctgtaaatgaagggatatttaaacttgctactgttgttcaacaccattaatggtcagtgtgaaccattacaaagaatgtggcaacttgcttgtgcctaaaaggaggaattggaactagaatgtgtgactctgtggggactgcataggtttgttaattgacctatagctaaaccttaatgtgtttgtgtgtctatacattgctttccgcatttcaagacatccagacgctattaccaacattttcctgtgcattaacctctgcatgtgaaaacttttaacagttactgaactatgtaaatatgtgaatttttttatttaggtggatgcattttttgtctgtttactgctcttctcagctttattcaataaacttgcattttaagggttgtattggcaattttaacttaaaatgtgcatcatgatggaaggtgcagacttttttggaagtttccgagaggagggtctatagaccatttgtcagaaatcagatcagccctcaaagaatggggtctgtgggctagttaaaatagaaataaacttttaaaatatccacag

SEQ ID NO: 1395 - protein, 186 aa, Homo sapien
MLALISRLLDWFRSLFWKEEMELTLVGLQYSGKTTFVNVIASGQFSEDMIPTVGFNMRKVTKGNVTIKIWDIGGQPRFRSMWERYCRGVNAIVYMIDAADREKIEASRNELHNLLDKPQLQGIPVLVLGNKRDLPNALDEKQLIEKMNLSAIQDREICCYSISCKEKDNIDITLQWLIQHSKSRRS

SEQ ID NO: 1396 - DNA, 716 bp, Homo sapien
gagcggcacagacgagatctcgatcgaaggcgagatggcggacgtgctagatcttcacgaggctgggggcgaagatttcgccatggatgaggatggggacgagagcattcacaaactgaaagaaaaagcgaagaaacggaagggtcgcggctttggctccgaggggtcccgagcgcggatgcgtgaggattatgacagcgtggagcaggatggcgatgaacccggaccacaacgctctgttgaaggctggattctctttgtaactggagtccatgaggaagccaccgaagaagacatacacgacaaattcgcagaatatggggaaattaaaaacattcatctcaacctcgacaggcgaacaggatatctgaaggggtatactctagttgaatatgaaacatacaaggaagcccaggctgctatggagggactcaatggccaggatttgatgggacagcccatcagcgttgactggtgttttgttcggggtccaccaaaaggcaagaggagaggtggccgaagacgcagcagaagtccagaccggagacgtcgctgacaggtcctctgttgtccaggtgttctcttcaagattccatttgaccatgcagccttggacaaataggactggggtggaacttgctgtgtttatatttaatctcttaccgtatatgcgtagtatttgagttgcgaataaatgttccatttttgttttctac

SEQ ID NO: 1397 - protein, 173 aa, Homo sapien
MADVLDLHEAGGEDFAMDEDGDESIHKLKEKAKKRKGRGFGSEGSRARMREDYDSVEQDGDEPGPQRSVEGWILFVTGVHEEATEEDIHDKFAEYGEIKNIHLNLDRRTGYLKGYTLVEYETYKEAQAAMEGLNGQDLMGQPISVDWCFVRGPPKGKRRGGRRRSRSPDRRRR

SEQ ID NO: 1398 - DNA, 4113 bp, Homo sapien
tgaggcgcgggaggcccgcgccccgcggctcgctgtgcgtgggagggcgcgagcgaacgcgggcgaggagcggccgagccgctgaagaggagctgggcgccggccgcccggccgcgctcggcccgcggatcgcctccgcccggtcttcgccggccccggcccctggcgagatgccgtgtggggaggattggctcagccacccgctgggaatcgtgcagggattcttcgcccaaaatggagttaatcctgactgggagaagaaagtaattgagtattttaaggaaaagctgaaggaaaataatgctcctaagtgggtaccatcactgaacgaagttccccttcattatttgaaacctaatagttttgtgaaatttcgttgcatgattcaggatatgtttgaccctgagttttacatgggagtttatgaaacggttaaccaaaacacaaaagcacatgttcttcattttggaaaatatagagatgtagcagagtgtgggcctcaacaagaacttgatttaaactctccacgaaataccactttggaaagacagactttctattgtgttccggtgcctggggaatctacgtgggtaaaagaagcctatgttaatgcaaaccaagctcgagtcagtccctcaacatcctacactcctagtcgccacaagaggagttatgaagatgatgacgatatggacctacagcccaataagcagaaagaccaacatgcaggtgccagacaagcagggagtgttggtggtcttcaatggtgtggagagccaaaacgtttagaaactgaagcttctactgggcaacagctgaactctctgaacttgtcttctccttttgatttgaattttccattgccaggagagaagggccctgcatgccttgtgaaggtttatgaagattgggattgtttcaaagtaaatgacattcttgagctatatggcatactgtctgtggatcctgtgctgagtatactgaataatgatgaaagggatgcctctgcactgctggatccgatggagtgcacagacacagcagaggagcagagagtacacagtcctcctgcttcattagtgccgagaattcatgtgatcttagcccagaagttgcaacacatcaacccattattgcctgcctgccttaacaaagaggagagcaaaacctgtaagtttgtttcaagtttcatgtccgaattgtctccagtcagagcagaacttcttgggttccttactcatgcccttctgggggatagtttggctgctgaataccttatattacatctcatctccacagtatatacaagaagagatgtccttccactaggaaaatttacagttaacttgagtggttgcccacggaatagtaccttcacagaacacttgtatcgaattattcaacatcttgttccagcatcttttcgtctgcagatgactatagagaacatgaaccatttgaaattcattccccacaaagactacacagccaatcgcttggtcagtgggctcctccagctgcccagcaatacttcccttgtaatcgatgagactctcctggaacaggggcagctggataccccaggtgttcataatgtgacagccctgagcaacctcataacgtggcagaaggtggattatgacttcagctaccatcagatggaattcccctgcaatattaacgttttcattacttcggaggggaggtcactcctcccggcagactgccagattcacttacagccccagctaattccaccaaacatggaggagtacatgaacagccttctctcagcggtgctgccttccgtgctgaacaaattccgcatttatctaactcttttgagattcttggaatatagcatatctgatgaaataaccaaggcagttgaagatgactttgtggaaatgcggaagaacgaccctcagagcatcactgctgatgatcttcaccagctgctcgtggtggctcggtgtctgtctctcagtgctggtcagacaacgctgtcaagagaacgatggctgagagcaaagcagctagagtctttaagaagaacgaggcttcagcagcaaaaatgtgtgaatggaaatgaactttaaagatgtaatacctatgaagagtaatgggcaaactgtagccacataattgtaaaattcagatattcatttataccacattgttttataggtaatttctatcacaaaccagtgacatttcctgaaatcaagcctggtaacacctgatgtttatatgatattcagtaaggacttttaccttactgatttcatggagcttttgaagtttgttttataataattatataaattagtaatgatgtaaaaaaagtatttgatattaaaagtttaatattgataatgttgctgattgtaccatttccttagcttcagctgagtcataggccagactgttgaaatgctgaaatgaagaaggttgttgcagtttcaaagtcagaggaatcgtgcttcggatttcttatgttttctagttctctgtttttccagttcacagtgggttggggtgcattcagtagtccatctttggggaacggaggcgtacttgccattgattcacatgactacatgaaattctgtactgtcatttcccagatgtttggccacagaaactttttcccacttaacatttgttaacagcctgcaaaactaaacttgtacatggcagtggttcccagacttttgtattttatggaccggtagtaatatttccaaaaatctggggtactataaggttgccaatttaccttgccaagtaatccgaataaatcactgtattatcaccatttttttcataaaaggaaaggacaatctatctctgaataagaggagtcctttaaacggaatgaatgtggcttttgggggcaaaagaaaccaagacactacattgtctttattttctcctatcccagtgcatttgagaaccatgcataagggaatgctgtgctacaaagctgtgcccaaatatgaaaacaaaataggaaacttaaaaagcaataccccctttagaaagtttttattttcttaaatgtcattgagttgctttgattctattggatttttggcattttttatgggatcatcagttggttccaagtatgttagatcagctaacatctgctactccagtaacagcctcgtacaactgcaggtaggttttctccagaccaattagttttaatagagcaaactaacaacagactgtagtagcatggttatggcaaccagaatcttcagaaaggttaggacattactttttaagctgtcagtggtatcaaataacttacctagttggaggcagataaaggatcccttacgttttttcctataaggcctaaattgaaattgttaaccaaggaaacagggtcagccttgaaaaatcaaggaattcattgtacctaataactgaagtaaaaataactagttgttcaacttttcctaaactcaaatctatttttataaacaaatgtaaataatgtttatattagagttgaactggttttcatttttataactggtagactagaccttccttaaacttttagaaataaaatgaaggcttcactggatttgtgaggataaaatacattttctttaattgtcctagagcaaagtacattagtcaccatgtgttttttgtgccaatgtaacttgtaatttaccaaagaaaaatacatacattgcttggtcttgcagaaaagttcccttgaaagaacctttccaataaataaaacgtcccaaattagcagtaccttgggctgtttttcatgagtaagaagattcaccatcccatgtgatctgtgtggaaaaagaccatgtcctcttggtggaagacatgagagagctgaactgaagtggaggaggtggtgcaagagggaccttcctgctcaaggcccgcccaggcagcggaatagagtgcagtgcttggctgcagaaaccctttgtccctcacctatatatacacggacagtcaagtttgttgctctaacgtaaggcacagcgttaatcctgtatggccaggaaactgagtagactcctgtgtaaccctgtttggaactttgccttcttaaaatgatttttc

SEQ ID NO: 1399 - protein, 642 aa, Homo sapien
MPCGEDWLSHPLGIVQGFFAQNGVNPDWEKKVIEYFKEKLKENNAPKWVPSLNEVPLHYLKPNSFVKFRCMIQDMFDPEFYMGVYETVNQNTKAHVLHFGKYRDVAECGPQQELDLNSPRNTTLERQTFYCVPVPGESTWVKEAYVNANQARVSPSTSYTPSRHKRSYEDDDDMDLQPNKQKDQHAGARQAGSVGGLQWCGEPKRLETEASTGQQLNSLNLSSPFDLNFPLPGEKGPACLVKVYEDWDCFKVNDILELYGILSVDPVLSILNNDERDASALLDPMECTDTAEEQRVHSPPASLVPRIHVILAQKLQHINPLLPACLNKEESKTCKFVSSFMSELSPVRAELLGFLTHALLGDSLAAEYLILHLISTVYTRRDVLPLGKFTVNLSGCPRNSTFTEHLYRIIQHLVPASFRLQMTIENMNHLKFIPHKDYTANRLVSGLLQLPSNTSLVIDETLLEQGQLDTPGVHNVTALSNLITWQKVDYDFSYHQMEFPCNINVFITSEGRSLLPADCQIHLQPQLIPPNMEEYMNSLLSAVLPSVLNKFRIYLTLLRFLEYSISDEITKAVEDDFVEMRKNDPQSITADDLHQLLVVARCLSLSAGQTTLSRERWLRAKQLESLRRTRLQQQKCVNGNEL

SEQ ID NO: 1400 - DNA, 1706 bp, Homo sapien
tgttcttgagcccagcttcttctcgtctcccaccccagcttcccggcattggaagaagggaccgtcctcttccttgtcttggccacccaaatcctggtatcgaaagggttgaacggaccggaagtgtgcagcagcgacgggtccccagctaatcgacgccggaagtagcaattactagacaagcattccgccgccggcttcgctatggcggcaattcccccagattcctggcagccacccaacgtttacttggagaccagcatgggaatcattgtgctggagctgtactggaagcatgctccaaagacctgtaagaactttgctgagttggctcgtcgaggttactacaatggcacaaaattccacagaattatcaaagacttcatgatccaaggaggtgacccaacagggacaggtcgaggtggtgcatctatctatggcaaacagtttgaagatgaacttcatccagacttgaaattcacgggggctggaattctcgcaatggccaatgcggggccagataccaatggcagccagttctttgtgaccctcgcccccacccagtggcttgacggcaaacacaccatttttggccgagtgtgtcagggcataggaatggtgaatcgcgtgggaatggtagaaacaaactcccaggaccgccctgtggacgacgtgaagatcattaaggcatacccttctgggtagacttgctaccctcttgagcagctcttctgagatggccccagtgaaccagcttctagatgacatagaatgacatgtaatgctaaatttcattttggctttgcaagtcatgaagcttaggaggcctggcatcttgggtgagttagagatggaagtacattttaataggatgcttcttttctcttcccccagtgcctaggttgccagagcatttgcacaaatgcccctgtttatcaataggtgactacttactacacatgaaccataatgctgcttcttgtgcatgtctgctctgatatacgtcgaacaatgtagcagccactgtcatttctcagtggttttgcctaaccaaacttcttcctaaggagatttatattctggcctacacagcagtccttgatggctgacagccacagaattccaaaccaagtagtgtctgtcagccctcttaactctgtgcacgccctatttcagtcttttacatttgttcttctagggaatgtatgcatctctatatatattttccctctcaaaaccagaacatcaacagtgctgtttctgacacttcagacatcccacgcaaagccacattgaatttttgccaaatgaaaaacacatccaacaatcaagtttctaagaaggtgtcaagtggggaataataataatgtataataatcaagaaattagtttattaaaaggaagcagaagcattgaccattttttcccagagaagaggagaaatctgtagtgagcaaaggacagaccatgaatcctccttgagaagtagtactctcagaaaggagaagcgccactcaagttcttttaacccaagactttagagaaattaggtccaagatttttatatgttcagttgtttatgtataaaaataactttctggattttgtggggaggagcaggagaggaaggaagttaatacctatgtaatacatagaaacttccacaataaaatgccattgatggttgaaaaaaaaaaaaaaaaaaa

SEQ ID NO: 1401 - protein, 166 aa, Homo sapien
MAAIPPDSWQPPNVYLETSMGIIVLELYWKHAPKTCKNFAELARRGYYNGTKFHRIIKDFMIQGGDPTGTGRGGASIYGKQFEDELHPDLKFTGAGILAMANAGPDTNGSQFFVTLAPTQWLDGKHTIFGRVCQGIGMVNRVGMVETNSQDRPVDDVKIIKAYPSG

SEQ ID NO: 1402 - DNA, 1745 bp, Homo sapien
accacgcgtctcatccatggcttccgcggactcgcgccgggtggcagatggcggcggtgccgggggcaccttccagccctacctagacaccttgcggcaggagctgcagcagacggacccaacgctgttgtcagtagtggtggcggttcttgcggtgctgctgacgctagtcttctggaagttaatccggagcagaaggagcagtcagagagctgttcttcttgttggcctttgtgattccgggaaaacgttgctctttgtcaggttgttaacaggcctttatagagacactcagacgtccattactgacagctgtgctgtatacagagtcaacaataacaggggcaatagtctgaccttgattgaccttcccggccatgagagtttgaggcttcagttcttagagcggtttaagtcttcagccggggctattgtgtttgttgtggatagtgcagcattccagcgagaggtgaaagatgtggctgagtttctgtatcaagtcctcattgacagtatgggtctgaagaatacaccatcattcttaatagcctgcaataagcaagatattgcaatggcaaaatcagcaaagttaattcaacagcagctggagaaagaactcaacaccttacgagttacccgttctgctgcccccagcacactgtacagttccagcactgcccctgctcagctggggaagaaaggcaaagagtttgaattctcacagttgcccctcaaagtggagttcctggagtgcagtgccaagggtggaagaggggacgtgggctctgctgacatccaggacttggagaaatggctggctaaaattgcctgagaggcagctctaaagcacaagacctggatgtgtgacacacagttttggaaaaaggtctgtggtagtctggagttgatgaggaaggggtacaagatgtggttagaaacatttctttgttctggaaacaaagtactgttgaaaccagcttggaattttttttttttttttttttaagttcagttctcccttatggctgcctttcaaacaagtaccttttatctgatgcctgtatcttccctttgttaaggtgtaacttgatgtagggtcaaggtttttgtgacaacaggcagactccacacagagaggatatgatgagaatatggccatcacctgaaaagttttcttatcttctgtgcttttggtccctggaaacaaatccgcctatgtatgaagctagttgatttccagttgcactatttccagttgcctctgaagttcacaggcaatacattgtctagtcctttgcgaatttctctgatttgtgggcacagttatgaagtttccccacatgtgaagacaggtacaaaatagcagagccaagcagacagtgggtctattcttcattagctcagtgacttgtccacactcgtcttagcacttacgtttcaaaagcttgtcacaaacccttggagtcattcccagataatagaactggaaatgataaatcccctaatgccaagggtctagtgtgttcttagtggttatactgggaagtgtgtggagatttaggtgctgctctgctgctctggatggctgaaggctcctgggccatcttcatgtgctgcttgaagagctcctattttgtactcctggctagaatgctgtggaacaaatacaaagtgaaaaaagttctctgtagatttctgaagtgcatattcattgatgccaagaaaaaaaaaaagttgcctttttg

SEQ ID NO: 1403 - protein, 271 aa, Homo sapien
MASADSRRVADGGGAGGTFQPYLDTLRQELQQTDPTLLSVVVAVLAVLLTLVFWKLIRSRRSSQRAVLLVGLCDSGKTLLFVRLLTGLYRDTQTSITDSCAVYRVNNNRGNSLTLIDLPGHESLRLQFLERFKSSAGAIVFVVDSAAFQREVKDVAEFLYQVLIDSMGLKNTPSFLIACNKQDIAMAKSAKLIQQQLEKELNTLRVTRSAAPSTLYSSSTAPAQLGKKGKEFEFSQLPLKVEFLECSAKGGRGDVGSADIQDLEKWLAKIA

SEQ ID NO: 1404 - DNA, 2946 bp, Homo sapien
cagcttcccaccctgggctttccgaggtgctttcgccgctgtccccaccactgcagccatgatctccttaacggacacgcagaaaattggaatgggattaacaggatttggagtgtttttcctgttctttggaatgattctcttttttgacaaagcactactggctattggaaatgttttatttgtagccggcttggcttttgtaattggtttagaaagaacattcagattcttcttccaaaaacataaaatgaaagctacaggtttttttctgggtggtgtatttgtagtccttattggttggcctttgataggcatgatcttcgaaatttatggattttttctcttgttcaggggcttctttcctgtcgttgttggctttattagaagagtgccagtccttggatccctcctaaatttacctggaattagatcatttgtagataaagttggagaaagcaacaatatggtataacaacaagtgaatttgaagactcatttaaaatattgtgttatttataaagtcatttgaagaatattcagcacaaaattaaattacatgaaatagcttgtaatgttctttacaggagtttaaaacgtatagcctacaaagtaccagcagcaaattagcaaagaagcagtgaaaacaggcttctactcaagtgaactaagaagaagtcagcaagcaaactgagagaggtgaaatccatgttaatgatgcttaagaaactcttgaaggctatttgtgttgtttttccacaatgtgcgaaactcagccatccttagagaactgtggtgcctgtttcttttctttttattttgaaggctcaggagcatccataggcatttgctttttagaagtgtccactgcaatggcaaaaatatttccagttgcactgtatctctggaagtgatgcatgaattcgattggattgtgtcattttaaagtattaaaaccaaggaaaccccaattttgatgtatggattacttttttttgtaaacatggttaaaataaaacttttgtggttcttctgaatcttaatatttcaaagccaggtgaaaatctgaactagatattctttgttggaatatgcaaaggtcattctttactaacttttagttactaaattatagctaagttttgtcagcagcatactccggaaagtctcatacttcttgggagtctgccctcctaagtatctgtctatatcattcattacgtgtaagtatttaacaaaaaagcattcttgaccatgaatgaagtagtttgtttcatagcttgtctcattgaatagtattattgaagatactaaatgatgcaaaccaaatggattttttccatgtcatgatgtaatttttctttcttctttcttttttttaaattttagcagtggcttattatttgtttttcataaattaaaataacttttgataatgtttactttaagacatgtaacatgttaaaaggttaaacttatggctgtttttaaagggctattcatttaatctgagttttcccttattttcagctttttcctagcatataatagtcattaagcatgacatatccttcatatgatcactcatcttgagttaattagaaaatacctgagttcacgtgctaaagtcatttcactgtaataaactgactatggtttcttaagaacatgacactaaaaaaaaaagtggtttttttccaccgttgctgattattagacagtaggaaatagctgttttctttagttttacaagatgtgacagctttagtggtagatgtagggaaacatttcaacagccatagtactatttgttttaccactgattgcactattttgtttttttaacagttgcaaagctttttaatgcataaaagtataattgaaatctgtggtatttatttacaaacatgtctacaaaaatagattacagcttattttatttttagttaaatctcttaatacacagagaactcccaatcttgctcatctaaataaggaaagacttggtgtatagtgtgatggtttagtcttaaggattaagacatttttggtacttgcatttgacttacgatgtatctgtgaaaatgggatgatattgacaaatggagactcctacctcaatagttaatggaataataagaggctactgttgtgtctaatgttcttcaaaaaagtaatatcctcacttggagagtgtcaaatacatactttgaggattgactttatataaggtgccctgtagaactctgttacacatatttttgacccatattatttacaatgtcttgataattctacctttttagagcaagaatagtatctgctaatgtaagggacatctgtatttaactcctttgtagacatgaatttctatcaaaatgttctttgcactgtaacagagattccttttttcaataatcttaattcaaaagcattattagacttgaaagggtttgataatctcccagtccttagtaaagattgagagaggctggagcagttttcagttttaaatgagtctgcagttaatatcaaatgtgagtttgggactgcctggcaacatttatatttcttattcagaacccttgatgagactatttttaaacatactagtctgctgatagaaagcactatacatcctattgtttctttctttccaaaatcagccttctgtctgtaacaaaaatgtactttatagagatggaggaaaaggtctaatactacatagccttaagtgtttctgtcattgttcaagtgtattttctgtaacagaaacatatttggaatgtttttcttttccccttataaattgtaattcctgaaatactgctgctttaaaaagtcccactgtcagattatattatctaacaattgaatattgtaaatatacttgtcttacctctcaataaaagggtacttttctatcaaaaaaaaaaaaaaaaaaaa

SEQ ID NO: 1405 - protein, 138 aa, Homo sapien
MISLTDTQKIGMGLTGFGVFFLFFGMILFFDKALLAIGNVLFVAGLAFVIGLERTFRFFFQKHKMKATGFFLGGVFVVLIGWPLIGMIFEIYGFFLLFRGFFPVVVGFIRRVPVLGSLLNLPGIRSFVDKVGESNNMV

SEQ ID NO: 1406 - DNA, 3366 bp, Homo sapien
aaaaaaccaggaagtgaagtccccgagcacgttagaaagcctgacatggcctgactcgggacagctcagagcagggcagaactggggacactctgggccggccttctgcctgcatggacgctctgaagccaccctgtctctggaggaaccacgagcgagggaagaaggacagggactcgtgtggcaggaagaactcagagccgggaagcccccattcactagaagcactgagagatgcggccccctcgcagggtctgaatttcctgctgctgttcacaaagatgctttttatctttaactttttgttttccccacttccgaccccggcgttgatctgcatcctgacatttggagctgccatcttcttgtggctgatcaccagacctcaacccgtcttacctcttcttgacctgaacaatcagtctgtgggaattgagggaggagcacggaagggggtttcccagaagaacaatgacctaacaagttgctgcttctcagatgccaagactatgtatgaggttttccaaagaggactcgctgtgtctgacaatgggccctgcttgggatatagaaaaccaaaccagccctacagatggctatcttacaaacaggtgtctgatagagcagagtacctgggttcctgtctcttgcataaaggttataaatcatcaccagaccagtttgtcggcatctttgctcagaataggccagagtggatcatctccgaattggcttgttacacgtactctatggtagctgtacctctgtatgacaccttgggaccagaagccatcgtacatattgtcaacaaggctgatatcgccatggtgatctgtgacacaccccaaaaggcattggtgctgatagggaatgtagagaaaggcttcaccccgagcctgaaggtgatcatccttatggacccctttgatgatgacctgaagcaaagaggggagaagagtggaattgagatcttatccctatatgatgctgagaacctaggcaaagagcacttcagaaaacctgtgcctcctagcccagaagacctgagcgtcatctgcttcaccagtgggaccacaggtgaccccaaaggagccatgataacccatcaaaatattgtttcaaatgctgctgcctttctcaaatgtgtggagcatgcttatgagcccactcctgatgatgtggccatatcctacctccctctggctcatatgtttgagaggattgtacaggctgttgtgtacagctgtggagccagagttggattcttccaaggggatattcggttgctggctgacgacatgaagactttgaagcccacattgtttcccgcggtgcctcgactccttaacaggatctacgataaggtacaaaatgaggccaagacacccttgaagaagttcttgttgaagctggctgtttccagtaaattcaaagagcttcaaaagggtatcatcaggcatgatagtttctgggacaagctcatctttgcaaagatccaggacagcctgggcggaagggttcgtgtaattgtcactggagctgcccccatgtccacttcagtcatgacattcttccgggcagcaatgggatgtcaggtgtatgaagcttatggtcaaacagaatgcacaggtggctgtacatttacattacctggggactggacatcaggtcacgttggggtgcccctggcttgcaattacgtgaagctggaagatgtggctgacatgaactactttacagtgaataatgaaggagaggtctgcatcaagggtacaaacgtgttcaaaggatacctgaaggaccctgagaagacacaggaagccctggacagtgatggctggcttcacacaggagacattggtcgctggctcccgaatggaactctgaagatcatcgaccgtaaaaagaacattttcaagctggcccaaggagaatacattgcaccagagaagatagaaaatatctacaacaggagtcaaccagtgttacaaatttttgtacacggggagagcttacggtcatccttagtaggagtggtggttcctgacacagatgtacttccctcatttgcagccaagcttggggtgaagggctcctttgaggaactgtgccaaaaccaagttgtaagggaagccattttagaagacttgcagaaaattgggaaagaaagtggccttaaaacttttgaacaggtcaaagccatttttcttcatccagagccattttccattgaaaatgggctcttgacaccaacattgaaagcaaagcgaggagagctttccaaatactttcggacccaaattgacagcctgtatgagcacatccaggattaggataaggtacttaagtacctgccggcccactgtgcactgcttgtgagaaaatggattaaaaactattcttacatttgttttgcctttcctcctatttttttttaacctgttaaactctaaagccatagcttttgttttatattgagacatataatgtgtaaacttagttcccaaataaatcaatcctgtctttcccatcttcgatgttgctaatattaaggcttcagggctacttttatcaacatgcctgtcttcaagatcccagtttatgttctgtgtccttcctcatgatttccaaccttaatactattagtaaccacaagttcaagggtcaaagggaccctctgtgccttcttctttgttttgtgataaacataacttgccaacagtctctatgcttatttacatcttctactgtcaaactaagagatttttaaattctgaaaaactgcttacaattcatgttttctagccactccacaaaccactaaaattttagttttagcctatcactcatgtcaatcatatctatgagacaaatgtctccgatgctcttctgcgtaattaaattgtgtactgaagggaaaagtttgatcataccaaacatttcctaaactctctagttagatatctgacttgggagtataaaaattggtctatgacatattgtccaaaaggaatgctgttcttaaagcattatttacagaaggaactggggagtaaatctgtccctacagtttgctgctgagctggaagctgtgggggaaggagttgacaggtgggcccagtgaacttttccagtaaatgaagcaagcactgaataaaaacctcctgaactgggaacaaagatctacaggcaagcaagatgcccacacaacaggcttattttctgtgaaggaaccaactgatctcccccacccttggattagagttcctgctctaccttacccacagataacacatgctgtttctacttgtaaatgtaaagtctttaaaataaactattacagatacttaaaaaaaaaaaaaaaaa

SEQ ID NO: 1407 - protein, 683 aa, Homo sapien
MLFIFNFLFSPLPTPALICILTFGAAIFLWLITRPQPVLPLLDLNNQSVGIEGGARKGVSQKNNDLTSCCFSDAKTMYEVFQRGLAVSDNGPCLGYRKPNQPYRWLSYKQVSDRAEYLGSCLLHKGYKSSPDQFVGIFAQNRPEWIISELACYTYSMVAVPLYDTLGPEAIVHIVNKADIAMVICDTPQKALVLIGNVEKGFTPSLKVIILMDPFDDDLKQRGEKSGIEILSLYDAENLGKEHFRKPVPPSPEDLSVICFTSGTTGDPKGAMITHQNIVSNAAAFLKCVEHAYEPTPDDVAISYLPLAHMFERIVQAVVYSCGARVGFFQGDIRLLADDMKTLKPTLFPAVPRLLNRIYDKVQNEAKTPLKKFLLKLAVSSKFKELQKGIIRHDSFWDKLIFAKIQDSLGGRVRVIVTGAAPMSTSVMTFFRAAMGCQVYEAYGQTECTGGCTFTLPGDWTSGHVGVPLACNYVKLEDVADMNYFTVNNEGEVCIKGTNVFKGYLKDPEKTQEALDSDGWLHTGDIGRWLPNGTLKIIDRKKNIFKLAQGEYIAPEKIENIYNRSQPVLQIFVHGESLRSSLVGVVVPDTDVLPSFAAKLGVKGSFEELCQNQVVREAILEDLQKIGKESGLKTFEQVKAIFLHPEPFSIENGLLTPTLKAKRGELSKYFRTQIDSLYEHIQD

SEQ ID NO: 1408 - DNA, 1510 bp, Homo sapien
gcggcaatcatggcgccacctgtgagatactgcatccccggcgaacgtctgtgtaacttggaggagggcagcccgggcagcggcacctacacccgccacggctacatcttttcgtcgcttgccggctgtctgatgaagagcagcgagaatggcgcgcttccagtggtgtctgtagtgagagaaacagagtcccagttactgccagatgtgggagctattgtaacctgtaaggtctctagcatcaattcacgctttgccaaagtacacatcctgtatgtggggtccatgcctcttaagaactcttttcgaggaactatccgcaaggaagatgtccgagcaactgaaaaagacaaggttgaaatttataagagtttccgcccaggtgacattgtcttggccaaagtgatctccttaggtgatgcacagtccaactacctgctaaccaccgccgagaacgagctgggagtggtggtagcccacagtgagtcaggtatccagatggttcccatcagctggtgtgagatgcagtgccctaagacccacactaaagaattccggaaagtagcccgagtacaacccgaattcttgcagacctaagaagccactttttaccctatggaagggggtaagctgttcctgagtataacaccaagatgctgctgtctttattcaaacacctggcgtcggccaacagccacttccagaaaaatcttccagtttacgctgtagatggaacatgtttctgtgaacctatcagtggatttcattctcttgagtaataaatcttatcttttcaaggcaccaacaaacaaaactgtgatattggaaatagcctatccctcctgacagtccttataaatacatattttttgctatgataaaacttttttactaaaaggatgttatagagtctgttgtcttaagcagagaaagacatctaaatggtgtcaggacatttcagtacttctgcttattgagtacttactgtgctaggcactgagtcaggtgctttacatacgtccccttcatttaggtacattgtgatttaatgaaaatttgaggacacgtggtgatacagatagcatgtgaggcaggcatggtggctcatgtttgtaaatcccagcactttgggaaggccgagttggttttgaactcctggcctcccaaggtgctgatagtacaggcatgaaccactgtgcttggccttttaaaattttgtagagatgcagtcttactatgttgcccaggctgtctcaaactcctggcctcaagtggtcctcctgccttggcctcccaaaatgttgcaattacaggcatgagcactgtgcttggcaagctaaggaggattttcactagcagtttcatttgacaataccaatctagaggtgagcttctcaatctttaatgtgtatccaaatcacctggggaatagatgccgattctgaaacaggtctggagtgagacctgaggttctgcatgtataacaagctcccagggggtccagctgtca

SEQ ID NO: 1409 - protein, 195 aa, Homo sapien
MAPPVRYCIPGERLCNLEEGSPGSGTYTRHGYIFSSLAGCLMKSSENGALPVVSVVRETESQLLPDVGAIVTCKVSSINSRFAKVHILYVGSMPLKNSFRGTIRKEDVRATEKDKVEIYKSFRPGDIVLAKVISLGDAQSNYLLTTAENELGVVVAHSESGIQMVPISWCEMQCPKTHTKEFRKVARVQPEFLQT

SEQ ID NO: 1410 - DNA, 3334 bp, Homo sapien
gcacgagccccgggctgccggcgcgggcgccgcggcacgtccacaggctgggtcgcgaggtggcgatcgctgagaggcaggagggccgaggcgggcctgggaggcggcccggaggtggggcgccgctggggccggcccgcacgggcttcatctgagggcgcacggcccgcgaccgagcgtgcggactggcctcccaagcgtggggcgacaagctgccggagctgcaatgggccgcggctggggattcttgtttggcctcctgggcgccgtgtggctgctcagctcgggccacggagaggagcagcccccggagacagcggcacagaggtgcttctgccaggttagtggttacttggatgattgtacctgtgatgttgaaaccattgatagatttaataactacaggcttttcccaagactacaaaaacttcttgaaagtgactactttaggtattacaaggtaaacctgaagaggccgtgtcctttctggaatgacatcagccagtgtggaagaagggactgtgctgtcaaaccatgtcaatctgatgaagttcctgatggaattaaatctgcgagctacaagtattctgaagaagccaataatctcattgaagaatgtgaacaagctgaacgacttggagcagtggatgaatctctgagtgaggaaacacagaaggctgttcttcagtggaccaagcatgatgattcttcagataacttctgtgaagctgatgacattcagtcccctgaagctgaatatgtagatttgcttcttaatcctgagcgctacactggttacaagggaccagatgcttggaaaatatggaatgtcatctacgaagaaaactgttttaagccacagacaattaaaagacctttaaatcctttggcttctggtcaagggacaagtgaagagaacactttttacagttggctagaaggtctctgtgtagaaaaaagagcattctacagacttatatctggcctacatgcaagcattaatgtgcatttgagtgcaagatatcttttacaagagacctggttagaaaagaaatggggacacaacattacagaatttcaacagcgatttgatggaattttgactgaaggagaaggtccaagaaggcttaagaacttgtattttctctacttaatagaactaagggctttatccaaagtgttaccattcttcgagcgcccagattttcaactctttactggaaataaaattcaggatgaggaaaacaaaatgttacttctggaaatacttcatgaaatcaagtcatttcctttgcattttgatgagaattcattttttgctggggataaaaaagaagcacacaaactaaaggaggactttcgactgcattttagaaatatttcaagaattatggattgtgttggttgttttaaatgtcgtctgtggggaaagcttcagactcagggtttgggcactgctctgaagatcttattttctgagaaattgatagcaaatatgccagaaagtggacctagttatgaattccatctaaccagacaagaaatagtatcattattcaacgcatttggaagaatttctacaagtgtgaaagaattagaaaacttcaggaacttgttacagaatattcattaaagaaaacaagctgatatgtgcctgtttctggacaatggaggcgaaagagtggaatttcattcaaaggcataatagcaatgacagtcttaagccaaacattttatataaagttgcttttgtaaaggagaattatattgttttaagtaaacacatttttaaaaattgtgttaagtctatgtataatactactgtgagtaaaagtaatactttaataatgtggtacaaattttaaagtttaatattgaataaaaggaggattatcaaattcatatatgataaaagtgaatgttctaagtctctcaaactagcgttttatgtaataatatgtaatataaataaaactatggtaaatgtgacaagcatttaataggaaaatgctaaggaggcctcataaatgacccataattaccaacgtagaatttttcagtacatttagggttgctggatttagcaaataaaaataaagattgcccagttagatttgaatttcagataaacaattagttttttaatattttacatggaatatttggaaaatacttatactaaaaaattatttgtttgaaattcacatttaactgggagtcttgtattttatctggcaatcctaaaatacattggtatgaaacaaatcacttttagaagtatattgctattttgattgggttgtttttgtgtgtagaaacgtacaataacaactcaaaggcacaggagatttctaaacattgtgaaaagttgaatagattatatatttattctcataatactttcactaatactaaataaaatttggggaacactttttatttttatataatttccaatttacagaaaagtttcaaaaatagtacaaagagctctcttacccagattcactaattgttcatacgtgctttatctttcatgctttctctgtacacacacacacacacacaaatttttcctcaatcatttgaaagtcagttataggcatcatgccccttaaaccctaaatacttcagtgtgtaatactgaataattactaaaaatgattttctcagaaaaaaaaactcccacaattctggaactataatactgtaagccttagaataaataatactttcaagttccaatctaaagttctttttgagttttgttgcccgttttatgcttgatgtgtatagtaatagggtaggctatttattttattaaaattttttttagagacaaggttttgctgtgttgcccaagctggaacttgaacgactgggctgaagtgatcttcccacctcagcctcccaagtagctgggaatacaggtgtctgccaccatacccagtttcatttttgttttttatacccgaagttcatttcctttgtctccctaaaactgaactgtaattttgggaggttttcattagtggaagctcttcatttataaagctatttgaaggggtttaggaatttatatcacatggtaattgtagagaaaaagaagctatatacctcaaaatcgtgccctctttacatatgtcttatcaggtataacatgttgaaatgtcacattagtagtaaagtggggtttatttatatagtggttaagaaatgtcagtttacactgctgtatacttcttcttctgtgtccctaaggcctggtacagtgccaagcacatacttggtatccaataaatatttgttggatgaaaaaaaaaaaaaaaaaaaa

SEQ ID NO: 1411 - protein, 468 aa, Homo sapien
MGRGWGFLFGLLGAVWLLSSGHGEEQPPETAAQRCFCQVSGYLDDCTCDVETIDRFNNYRLFPRLQKLLESDYFRYYKVNLKRPCPFWNDISQCGRRDCAVKPCQSDEVPDGIKSASYKYSEEANNLIEECEQAERLGAVDESLSEETQKAVLQWTKHDDSSDNFCEADDIQSPEAEYVDLLLNPERYTGYKGPDAWKIWNVIYEENCFKPQTIKRPLNPLASGQGTSEENTFYSWLEGLCVEKRAFYRLISGLHASINVHLSARYLLQETWLEKKWGHNITEFQQRFDGILTEGEGPRRLKNLYFLYLIELRALSKVLPFFERPDFQLFTGNKIQDEENKMLLLEILHEIKSFPLHFDENSFFAGDKKEAHKLKEDFRLHFRNISRIMDCVGCFKCRLWGKLQTQGLGTALKILFSEKLIANMPESGPSYEFHLTRQEIVSLFNAFGRISTSVKELENFRNLLQNIH

SEQ ID NO: 1412 - DNA, 2064 bp, Homo sapien
ctgttccaaaccacgtggacgcgtctgggctgctggaggcagcccgagccgccgccgtcggtgtcgccgccaccaccaccatcggagtcacgagtcccgcgtctgtccgaagtcgccgctctcgggctgctcacgtctcttcggagagcgcgcacatggcgactcaggcgtactccctcagctacgcagggtgcaacttcttgcgccaacgtctggtcctgtctaccctgagcgggcgccccgtcaaaatccgaaagattcgggccagagacgacaacccgggcctccgagattttgaagccagcttcataaggctattggacaaaataacgaatggttctcgaattgaaataaaccaaacaggaacaaccttatattatcagcctggcctcctgtatggtggatctgtggaacatgactgtagcgtccttcgtggcattgggtattacctggagagtcttctttgcttggctccatttatgaagcacccgttaaaaatagttctacgaggagtgaccaatgatcaggttgacccttcagttgatgttcttaaggcaacagcactccctttgttgaaacaatttgggattgatggtgaatcatttgaactgaatattgtgcgacggggaatgcctcccggaggaggaggcgaagtggttttctcatgtcctgtgaggaaggtcttgaagcccattcaactcacagatccaggaaaaatcaaacgtattagaggaatggcgtactctgtacgtgtgtcacctcagatggcgaaccggattgtggattctgcgaggagcatcctcaacaagttcatacctgatatctatatttacacagatcacatgaaaggagtcaactctgggaagtctccgggctttgggttgtcactggttgctgagaccaccagtggcaccttcctcagtgctgaactggcctccaacccccagggccagggagcagcagtacttccagaggaccttggcaggaactgtgcccggctgctgctggaggaaatctacaggggtggatgcgtagactcgaccaaccaaagcctggcgctactactcatgacccttggacagcaggatgtttccaaagtcctgctaggccctctctctccctacacgatagaatttttgcggcatttgaagagctttttccagattatgtttaaaattgaaaccaagccatgtggtgaagaactcaagggtggggataaagtgctgatgacctgtgttggcattggtttctccaaccttagcaagaccctcaagtgataaccatcacaagataaggccccagtgcctacagacaaagcagaagctgccacggacaccaatgggaccaagtccaaatggattaatccaggacagaatagccacttgcttaattttctgtgaagaaatatcaatatacaaataaaagacatccctgtagcatatggtttccagctgtttctccagtggcattgccattgcccaggaggggcccagtcaccatgagagctcccttgccttacctggaggaagaatgtgccttcaggccacagtcgtgctgctagaacagtctcatagctgcagttcagctgtgcttcctcagcctactatcataggcttcctcagccctctgtcatatggctgttttgcaaacctgtggagtctgttactgttctttctgcaaggactcacctccttgagccttggtttttgttgtagggattaaatgagataatatgagtggcagctcttcatgagtcctgcagtgctaagcaaatgtcagaaattggtgtattagactatttatctttgatcttctgaatggattgctgtcatggacacggacacggatcttcatctggttcattgtatttatatgtgagggatggatggctgcggggctccaagtaagttattgggatgttttttatattccaggtgtgctgtacattcttattttattttcacaacagctctgtgatgtaaatgctatctccatgagaaaattcataaagggtgttttgttcctttgaaatgtataatgtaaagacattaaatctcctcattt

SEQ ID NO: 1413 - protein, 373 aa, Homo sapien
MATQAYSLSYAGCNFLRQRLVLSTLSGRPVKIRKIRARDDNPGLRDFEASFIRLLDKITNGSRIEINQTGTTLYYQPGLLYGGSVEHDCSVLRGIGYYLESLLCLAPFMKHPLKIVLRGVTNDQVDPSVDVLKATALPLLKQFGIDGESFELNIVRRGMPPGGGGEVVFSCPVRKVLKPIQLTDPGKIKRIRGMAYSVRVSPQMANRIVDSARSILNKFIPDIYIYTDHMKGVNSGKSPGFGLSLVAETTSGTFLSAELASNPQGQGAAVLPEDLGRNCARLLLEEIYRGGCVDSTNQSLALLLMTLGQQDVSKVLLGPLSPYTIEFLRHLKSFFQIMFKIETKPCGEELKGGDKVLMTCVGIGFSNLSKTLK

SEQ ID NO: 1414 - DNA, 1493 bp, Homo sapien
ctacagatactgccgtgtgagagtacctgaggggctcctgaaagacctactgccaggaccagtgaccctggtgatggaacgctcggaggagctcaacaaggacctaaacccttttacgcctcttgtaggcattcggattcctgatcatgcttttatgcaagacttggctcagatgtttgagggtccgcttgctctcactagtgccaacctcagctcccaggccagttctctgaatgtcgaggagttccaggatctctggcctcagttgtccttggttattgatgggggacaaattggggatggccagagccccgagtgtcgccttggctcaactgtggttgatttgtctgtgcccggaaagtttggcatcattcgtccaggctgtgccctggaaagtactacagccatcctccaacagaagtacggactgctcccctcacatgcgtcctacctgtgaaactctgggaagcaggaaggcccaagacctggtgctggatactatgtgtctgtccactgacgactgtcaaggcctcatttgcagaggccaccggagctagggcactagcctgacttttaaggcagtgtgtctttctgagcactgtagaccaagcccttggagctgctggtttagccttgcacctggggaaaggatgtatttatttgtattttcatatatcagccaaaagctgaatggaaaagttaagaacattcctaggtggccttattctaataagtttcttctgtctgttttgtttttcaattgaaaagtaattaaataacagatttagaatctagtgagagcctcctctctggtgggtggtggcatttaaggttcaaaccagccagaagtgctggtgctgtttaaaaagtctcaggtggctgcgtgtggtggctcatgcctgtaatcccaacattctgggaggcccaggcgggagaactgcttgagcccaggagttcagaatcagcctgggcaacatagcaatactccgtctcataaaaattaataaataaaaagtctcaggtgaccaaaggctcctgaagctagaaccaggtttggataaagattgaagagccacaggccactcttccctctgagccattgggcctagtggtgtcatgtattgtaattgctcgcagggagagcagtctttttggtgtaatagtgggatgtctgcttagttggcaggggttcagtccaaatggaagaatattgggaaataaacctccactatcctttatagccagggacttttttcttatttattcataaaataaattatagttaattatacccataacacctttatttaaatccagtgttctccgcagccttttgtctatttatatgtgtaccaagtgttaaacataattattattgggcatttgaactttgtttttctttaaagaaatgctgctattaaacatatttgtaaatggaaaaaaaaaaaaaaaaaaaaaaaaaaaaaaaaaaaaaaaaaaaaaaaaaaaaaaaa

SEQ ID NO: 1415 - protein, 127 aa, Homo sapien
MERSEELNKDLNPFTPLVGIRIPDHAFMQDLAQMFEGPLALTSANLSSQASSLNVEEFQDLWPQLSLVIDGGQIGDGQSPECRLGSTVVDLSVPGKFGIIRPGCALESTTAILQQKYGLLPSHASYL

SEQ ID NO: 1416 - DNA, 1506 bp, Homo sapien
cagataggcgacacgcggcgggcgctgaggcgggaatggctgctgtactgcagcgcgtcgagcggctgtccaatcgagtcgtgcgtgtgttgggctgtaacccgggtcccatgaccctccaaggcaccaacacctacctagtggggaccggccccaggagaatcctcattgacactggagaaccagcaattccagaatacatcagctgtttaaagcaggctctaactgaatttaacacagcaatccaggaaattgtagtgactcactggcaccgagatcattctggaggcataggagatatttgtaaaagcatcaataatgacactacctattgcattaaaaaactcccacggaatcctcagagagaagaaattataggaaatggagagcaacaatatgtttatctgaaagatggagatgtgattaagactgagggagccactctaagagttctatatacccctggccacactgatgatcacatggctctactcttagaagaggaaaatgctatcttttctggagattgcatcctaggggaaggaacaacggtatttgaagacctctatgattatatgaactctttaaaagagttattgaaaatcaaagctgatattatatatccaggacatggcccagtaattcataatgctgaagctaaaattcaacaatacatttctcacagaaatattcgagagcagcaaattcttacattatttcgtgagaactttgagaaatcatttacagtaatggagcttgtaaaaattatttacaagaatactcctgagaatttacatgaaatggctaaacataatctcttacttcatttgaaaaaactagaaaaagaaggaaaaatatttagcaacacagatcctgacaagaaatggaaagctcatctttagtttcagattaaagaaagctttgttttattttgctttgagagaatggtatgttttcttaactataggttattttatagagaatataaaagtataaaacattaaaaataaccctagatatactttaaaataatgttatatttatgctaaaatatgtaaattacactatacaaccatatgataggttatttctctaaccttgtcttctaacgttttaccaaaaattcataatctaatagtttatcagttttcaatagattaaataaaatgattactttaaaaataataaaatttatctaatttaaagttgatattatttttggccgttagttatctattactagtgatcagttatactgttttctatagctactttatttaacagcacagatttctatgcacctttactctttcctcaacccttgtctctatctgtacataattgctttgtcttgatgtttctatcaactatatcatgactatctattggttccataactctgtatcatgtgtattttcttattctggtataccacaaatgattcatgcaaatgaatttttggtgattgaaaaatattaaattcccaatttaaagtattatatgata

SEQ ID NO: 1417 - protein, 288 aa, Homo sapien
MAAVLQRVERLSNRVVRVLGCNPGPMTLQGTNTYLVGTGPRRILIDTGEPAIPEYISCLKQALTEFNTAIQEIVVTHWHRDHSGGIGDICKSINNDTTYCIKKLPRNPQREEIIGNGEQQYVYLKDGDVIKTEGATLRVLYTPGHTDDHMALLLEEENAIFSGDCILGEGTTVFEDLYDYMNSLKELLKIKADIIYPGHGPVIHNAEAKIQQYISHRNIREQQILTLFRENFEKSFTVMELVKIIYKNTPENLHEMAKHNLLLHLKKLEKEGKIFSNTDPDKKWKAHL

SEQ ID NO: 1418 - DNA, 2272 bp, Homo sapien
gtgaggctggcggtggcgacaaccgaggaggaggggcgggacgccgtggagcacggcgaccggctgagcgtcatggagggctcaggggagcagccgggcccacaaccacagcatcccggagaccaccgcatccgcgacggcgacttcgtggtgctgaaacgtgaagatgtgtttaaagcagtacaagtccagcggagaaaaaaagtaactttcgaaaaacagtggttctacctggataacgtcattggccatagttatggaactgcatttgaagtgaccagtggaggaagtctacagcccaagaagaagagggaagagcctactgcagagactaaagaagcgggcactgataatcgaaatatagttgatgatgggaaatctcagaaacttactcaagatgacataaaagctttgaaggacaagggcattaaaggagaggaaatagttcagcagttaattgaaaatagtacaacattccgagacaagacagaatttgcccaagataaatatattaaaaagaagaaaaaaaaatatgaagccatcattactgttgtgaagccatccacccgtattctttcaattatgtattatgcaagagaacctggaaaaattaaccacatgagatacgatacactagcccagatgttgacgttgggaaatatccgtgctggcaacaaaatgattgtgatggaaacgtgtgcaggcttggtgctgggtgcaatgatggaacgaatgggaggttttggctccattattcagctataccctggaggaggacctgttcgggcagcaacagcatgttttggatttcccaaatcttttctcagtggtctttatgaattccctctcaacaaagtggacagtcttctacatggaacattttctgccaagatgttatcttcagagccaaaagacagtgctttggttgaagaaagtaatggcacactggaggaaaaacaggcttctgaacaagagaatgaagacagcatggcagaggccccagagagcaaccacccagaagaccaggaaacaatggaaacaatttctcaagatccagaacataaggggcctaaagagagaggaagcaaaaaagattatattcaggaaaaacagaggagacaagaagagcagaggaaaagacatttagaggctgccgctctgctgagtgaaagaaacgcagatggtttaattgtagctagtcgtttccaccccactcccctgctgctgtctttgctggactttgtggccccttcaaggccgtttgtggtctactgtcagtacaaagagcctctgttggaatgctacacaaaactgcgggagaggggaggggtcatcaacctcaggctgtctgaaacctggctcagaaattatcaggttttgccagatcgaagtcatcctaaactgctgatgagtggaggtgggggttatcttctctccggcttcaccgttgccatggacaaccttaaagcagacaccagcctcaaatctaatgcaagcactttagaatcacacgagactgaggagcctgcagctaaaaaacgaaaatgcccagagtctgactcttaacccttttgagaattgctctgaattttgttctcaggcattatacagttagtaattaaactttaaatgccattactacttgttttttcatatcccaagaataagaacatgtctatgtacccgtttctaggaaggaggagtatatgccttttgtctatttctgacacagatgcatttggtctgtcaaaactgcaaccatggggtatgtagtatgaccaactgcatttaacaaaactcctctaagtacttctaaatattctgtgcaaatatcttgagaacttcaacatcctaaaaatgtgtttctacaagactttatattttaagctaagtggaataatacaacgtaactaaaacatggcgggtaccgaaaggagggcaattcatggaagaaatttcctctgttcattccgttctcttcaacctaagcaatatggatgtgtgagtgtgtgatttattatggtaccaaaaatgtccaccttctttcctgcagcggaataagcttttttgaaatgctgaggttttattttaatagttgacaacctgggaaagttctgagtatttattttactgctcttttttgtgcatagaaaggtttagtagggtacttttttgcattaatttgccaatactcttattctttgttctaaataaagtgactagaatttttgtgtactattcaattaaaggaaaaaaaaaaaaaaaaaaaaaa

SEQ ID NO: 1419 - protein, 497 aa, Homo sapien
MEGSGEQPGPQPQHPGDHRIRDGDFVVLKREDVFKAVQVQRRKKVTFEKQWFYLDNVIGHSYGTAFEVTSGGSLQPKKKREEPTAETKEAGTDNRNIVDDGKSQKLTQDDIKALKDKGIKGEEIVQQLIENSTTFRDKTEFAQDKYIKKKKKKYEAIITVVKPSTRILSIMYYAREPGKINHMRYDTLAQMLTLGNIRAGNKMIVMETCAGLVLGAMMERMGGFGSIIQLYPGGGPVRAATACFGFPKSFLSGLYEFPLNKVDSLLHGTFSAKMLSSEPKDSALVEESNGTLEEKQASEQENEDSMAEAPESNHPEDQETMETISQDPEHKGPKERGSKKDYIQEKQRRQEEQRKRHLEAAALLSERNADGLIVASRFHPTPLLLSLLDFVAPSRPFVVYCQYKEPLLECYTKLRERGGVINLRLSETWLRNYQVLPDRSHPKLLMSGGGGYLLSGFTVAMDNLKADTSLKSNASTLESHETEEPAAKKRKCPESDS

SEQ ID NO: 1420 - DNA, 1066 bp, Homo sapien
ggcagttagtcggctgcaatggcgccggtgaggcggtccgcgaagtggcggcctggtggtattgaggcgcgtggtgaaggggtttccactgtcgggtacaggaataagaatgtgagacagaagacatggcggcctaaccacccgcaagccttcgtggggagcgttcgcgagggacaaggctttgcttttcgaagaaaactgaaaatacagcaaagttacaagaaattgctacggaaggaaaagaaggctcaaacgtcactggaatctcaattcacagatcgatacccagataatctgaaacatctctatttagctgaagaggaaagacataggaagcaagcaagaaaagtcgaccatcctttgtcagaacaagttcaccagccgttgcttgaagaacagtgtagcattgacgagcctttatttgaagatcagtgtagctttgaccagcctcagccagaagaacaatgtattaaaacagtaaactcctttacaatttcaaagaaaaataaaaagaaaacatcaaatcaaaaagcacaagaagaatatgaacagatacaagccaaacgtgctgctaagaaacaagaattcgagaggagaaaacaggagagagaagaagcccaaaggcagtacaaaaagaagaaaatggaagtgtttaaaatactgaacaaaaagactaaaaagggccaaccaaacttgaatgtacaaatggagtaccttcttcaaaaaatacaagaaaaatgttaaacattttgttcctacaggttaaaatatctgctgcctattaggttcttctgtgacatgtgcctcccagcagtgaactaaatttgtcgacataaactggattgctaaactatgctaaatataagatgttcacatatttttattatggtaaaaaattttctaaatatgttctacatgtttcttatttatttgcctctgaaggaaggttggcctgaagaactgaaagaacctcttattttgcaagacaggcccaagcatgtaatacttttgtaccatatgagatttatatgaaataaattttttaaaaataaggaaaaaaaaaaaa

SEQ ID NO: 1421 - protein, 241 aa, Homo sapien
MAPVRRSAKWRPGGIEARGEGVSTVGYRNKNVRQKTWRPNHPQAFVGSVREGQGFAFRRKLKIQQSYKKLLRKEKKAQTSLESQFTDRYPDNLKHLYLAEEERHRKQARKVDHPLSEQVHQPLLEEQCSIDEPLFEDQCSFDQPQPEEQCIKTVNSFTISKKNKKKTSNQKAQEEYEQIQAKRAAKKQEFERRKQEREEAQRQYKKKKMEVFKILNKKTKKGQPNLNVQMEYLLQKIQEKC

SEQ ID NO: 1422 - DNA, 2571 bp, Homo sapien
agcttcgcgctagtgctgtttttttttttttttttttttagcaatggcggttcccggcgtggggctcttgacccgtttgaacctgtgtgcccggagaagaactcgagtccagcggcctatcgtcaggcttttgagttgcccaggaactgtggccaaagaccttaggagagacgagcagccttcagggagcgtggagacaggctttgaagacaagattcccaaaaggagattctctgagatgcaaaatgaaagacgagaacaggcacagcggactgttttaatacattgcccagagaaaatcagtgaaaacaagtttcttaaatatttatcccaatttggacctattaataatcatttcttctatgaaagctttggtctctatgctgtcgtagaattttgccaaaaggaaagcataggttcactgcagaatgggactcatactccaagcacggccatggagactgcaattccattcagatcacgtttcttcaatctgaagttgaaaaaccagacttctgaacggtcacgcgtacggtcaagtaatcagttgccacgttcaaacaagcagctttttgaattactttgttatgcagaaagtatagacgatcagctgaacactctcttgaaggagttccagctaacagaggagaacactaagctccgatatctcacctgttctcttattgaagacatggccgccgcgtattttccagactgcatagtcagaccctttggctcctcagtcaacacttttgggaagttaggatgtgatttggacatgtttttggatctagatgaaaccagaaacctcagcgctcacaagatctcaggaaattttctgatggaatttcaagtgaaaaatgttccttcagaaagaattgcaactcagaagatcctgtctgtgttaggagagtgccttgaccactttggccctggctgtgtgggtgtgcaaaaaatattaaatgcccggtgtccgctcgtgaggttctcacaccaggcctccggatttcagtgtgatttgactacgaacaataggattgccttgacaagttccgaactcctttatatatatggtgccctagactcaagagtgagagccttggtgttcagtgtacggtgctgggctcgagcacattcactaacaagtagtattcctggtgcatggattacaaatttctcccttacaatgatggtcatcttttttctccagagaagatcaccccctattcttccaacactagattccttaaaaaccctagcagatgcagaagataaatgtgtaatagaaggcaacaactgcacatttgttcgtgacttgagtagaattaaaccttcacagaacacagaaacattagaattactactgaaggaattttttgagtattttggcaattttgctttcgataaaaattccataaatattcgacagggaagggagcaaaacaaacctgattcttctcctctgtacattcagaatccatttgaaacttctctcaacataagcaaaaatgtaagtcaaagccagctgcaaaaatttgtagatttggcccgagaaagtgccttgattttacaacaggaagatacagatcgaccttccatatcaagtaatcggccctgggggctggtatccctattgctaccatctgctccaaacagaaagtcctttaccaagaagaaaagcaataagtttgcaattgaaacagccaaaaacttgctagaatctttaaaaggtaacagaacagaaaatttcacaaaaaccagtgggaagagaacaattagtactcagacatgatggctgctacattgtgtaaagaactgggcttagcctatcaaatggtctgtggacttacttggaaaaactgatttgaaactttcacagatctcagctttcatctgatgtcacttttcatgatcttctcattggcccccttaacctggtctgaagttctgggatgttttcagtttgatcagtctgatactcagtggcactttattaaaacatcagctgtggagtgtggcggtgcacacctgtagtcccagctgctcaggaggctgaggcaggaggatctcttgagcccaggattttgaatccatcgtggacaacatagcaagattccatctctaaaaaaaatgaaaataaacataagccacaaggaatgggtgaaagattattgtaatgtgctttaactaaataggtaaatatactaaacaaatgctaaaactcagttttaggatgaaaccattgttgatatccacatcagtccctgtttagaaaacatttaaaatgacttttagttatgtacagtacgttggcaatgaatacattaagcttcaaaatttggtagtgctctcgaatatgtatatttgtatttttcaagcgaagttctcttattcacatataaattaaagtgggttggtactgatatcaaaaaatgtttatgtttttagaacagacatttcagtcactgcattcttaggtattccaaaccaaatatgatgacatcaatagattgcattttaaaaatattgtttgatttttctattttcaaaaataaaattctgtttctaact

SEQ ID NO: 1423 - protein, 582 aa, Homo sapien
MAVPGVGLLTRLNLCARRRTRVQRPIVRLLSCPGTVAKDLRRDEQPSGSVETGFEDKIPKRRFSEMQNERREQAQRTVLIHCPEKISENKFLKYLSQFGPINNHFFYESFGLYAVVEFCQKESIGSLQNGTHTPSTAMETAIPFRSRFFNLKLKNQTSERSRVRSSNQLPRSNKQLFELLCYAESIDDQLNTLLKEFQLTEENTKLRYLTCSLIEDMAAAYFPDCIVRPFGSSVNTFGKLGCDLDMFLDLDETRNLSAHKISGNFLMEFQVKNVPSERIATQKILSVLGECLDHFGPGCVGVQKILNARCPLVRFSHQASGFQCDLTTNNRIALTSSELLYIYGALDSRVRALVFSVRCWARAHSLTSSIPGAWITNFSLTMMVIFFLQRRSPPILPTLDSLKTLADAEDKCVIEGNNCTFVRDLSRIKPSQNTETLELLLKEFFEYFGNFAFDKNSINIRQGREQNKPDSSPLYIQNPFETSLNISKNVSQSQLQKFVDLARESALILQQEDTDRPSISSNRPWGLVSLLLPSAPNRKSFTKKKSNKFAIETAKNLLESLKGNRTENFTKTSGKRTISTQT

SEQ ID NO: 1424 - DNA, 1931 bp, Homo sapien
tttgctaaagccaccataaaggaaatagttgtgtggcccatgttgaggccagacatctttactggtttaaggggaccccctaaaggaattttgctctttggtcctcctgggactggtaaaactctaattggcaagtgcattgctagtcagtctggggcaacattctttagcatctctgcttcatccttaacttctaaatgggtaggtgagggggagaaaatggtccgtgcattgtttgctgttgcaaggtgtcagcaaccagctgtgatatttattgacgaaattgattccttgttatctcaacggggagatggtgagcatgaatcttctagaaggataaaaacagaatttttagttcaattagatggagcaacaacatcttctgaagatcgtatcctagtggtgggagcaacaaatcggccacaagaaattgatgaggctgcccggagaagattggtgaaaaggctttatattcccctcccagaagcttcagccaggaaacagatagtaattaatctaatgtccaaagagcagtgttgcctcagtgaagaagaaattgaacagattgtacagcagtctgatgcgttttcaggagcagacatgacacagctttgcagggaggcttctcttggtcctattcgcagtttacaaactgctgacattgctaccataacaccggatcaagttcgacccatagcttacattgattttgaaaatgcttttagaactgtgcgacctagtgtttctccaaaagatttagagctttatgaaaactggaacaaaacttttggttgtggaaagtaagtgggatacttggaatcaaggcatctctgtagtacagtcttctttattttttagcatagaaagttggggatgtgttaattgtatttttaagaatatattctaagttctgtacttcaaataatagcacagattttacatctgattgacatagtgtatgttaatgtaagttttgctttccagtgattacctgatacgtaagcctatttgaacaaagtgagaatgaacttttgtttctaagaagtctttatcttgaagctatataacatgaaaagtgagctcaaattttttttagttgaagattacatataaagttgtgtctgattaatattcatcttttattgaagaaagtgccttctgatggccacataattcttaatgtcagctagtataatggtttacatttggacaaagtattgcttagtgttatttaagtagatttaagatctcaaagctaaagtgccaatttttactttcttcagccaatttgttacctcttttatggttttaaatttttatcaggactaacattttcagaaatagcaaggtgtgatctagtattagattcacagaactgaaaggttaattaagaatgttggttattttcacgggagcgtgtgatatttaacattaatattttatttgacactacagcctgtaatactgctctctttcaaaaacaagttttcagatttttataacagacccattttgttttatgaaacatgttcattacagaaacatgagaaaatagagataagtaaaaagaataaaagtcactattatcctaccactttgcgggacacactattaatatttaagcatagattcttccagatgttttgttttatacagcagtaggattgtgtaatgtattctctcttgtagcctattcttcaaagcgtatcttcactttccatgttaacataaatgtccttttatgattgtctaggattccatggatggatggaatataattgagtcatctggtagagcgcatataggacaggacgctaggttgtttatcttttgtttattgtaaaggaactatgtgggatgcatttggtgatctttttaaaaaatgtataaatttcttgagtaattcctggattaaagaatatgcacttctt

SEQ ID NO: 1425 - protein, 254 aa, Homo sapien
MLRPDIFTGLRGPPKGILLFGPPGTGKTLIGKCIASQSGATFFSISASSLTSKWVGEGEKMVRALFAVARCQQPAVIFIDEIDSLLSQRGDGEHESSRRIKTEFLVQLDGATTSSEDRILVVGATNRPQEIDEAARRRLVKRLYIPLPEASARKQIVINLMSKEQCCLSEEEIEQIVQQSDAFSGADMTQLCREASLGPIRSLQTADIATITPDQVRPIAYIDFENAFRTVRPSVSPKDLELYENWNKTFGCGK

SEQ ID NO: 1426 - DNA, 1196 bp, Homo sapien
cgtggtttccggaacttcgcccgcgtctctgggcttttgctctgtcaggctggtggcgttttggtgtcttcgtttgttatggccgctgctgtcgctatggagacagatgatgctggaaatcgacttcggtttcagttggagttggaatttgtgcaatgtttagccaacccaaattaccttaattttcttgcccaaagaggttacttcaaagacaaagcttttgttaattatcttaaatacttgctttactggaaagacccagaatatgccaagtatctaaagtaccctcagtgtttacacatgttagagctgctccaatatgaacacttccgaaaggagctggtgaatgctcagtgtgcgaaatttattgatgaacagcagattctacattggcagcactattcccggaagcggatgcgccttcagcaagccttggcagagcagcaacagcaaaataacacatcgggaaaatgaaaaactggatacaaacgaggcacttaatacatgtatataatgtatttcttttgtacagtgaagacaaaaaaaatgaaaactcttcctatctacctttattatggtagcccctagaacctttagtgtgctttttcatccaactttttattgttaatagactatttctgttaaacctgaattgttctttgatttccctgtggatttgtaaggtgtttttcttttttacgcatttagcataatcagctgattaagaatggaaaagttaggtgctttagaccaaataaggcactggggcatggggtaggggtgggccaccaagtatactgaattctaaggctagctgttcctgacatatagtagggcaagaccatctcctggaaccttactgtctcagatcaactactctaccactctactctaagatgtagtgagagtagcggagtcactgacctctttaaatcataggacaggaactgcataaaggttcttgaattctgcaggacaggaaataactgtattacctgctttgcaaggtggctttaagaatcactgaatcactgtggcctcacttgacctagtcatggcaggacaactagtggttagttactaactggactcttgactttagaacaaacatgaggagcctcaaatacttgtgttcatttgggaaagctaccattgatttgggaggtaccacaaaccaggtgctatgttaagtgctt

SEQ ID NO: 1427 - protein, 131 aa, Homo sapien
MAAAVAMETDDAGNRLRFQLELEFVQCLANPNYLNFLAQRGYFKDKAFVNYLKYLLYWKDPEYAKYLKYPQCLHMLELLQYEHFRKELVNAQCAKFIDEQQILHWQHYSRKRMRLQQALAEQQQQNNTSGK

SEQ ID NO: 1428 - DNA, 1167 bp, Homo sapien
cttcagaacaggttctccttccccagtcaccagttgctcgagttagaattgtctgcaatggccgccctgcagaaatctgtgagctctttccttatggggaccctggccaccagctgcctccttctcttggccctcttggtacagggaggagcagctgcgcccatcagctcccactgcaggcttgacaagtccaacttccagcagccctatatcaccaaccgcaccttcatgctggctaaggaggctagcttggctgataacaacacagacgttcgtctcattggggagaaactgttccacggagtcagtatgagtgagcgctgctatctgatgaagcaggtgctgaacttcacccttgaagaagtgctgttccctcaatctgataggttccagccttatatgcaggaggtggtgcccttcctggccaggctcagcaacaggctaagcacatgtcatattgaaggtgatgacctgcatatccagaggaatgtgcaaaagctgaaggacacagtgaaaaagcttggagagagtggagagatcaaagcaattggagaactggatttgctgtttatgtctctgagaaatgcctgcatttgaccagagcaaagctgaaaaatgaataactaaccccctttccctgctagaaataacaattagatgccccaaagcgattttttttaaccaaaaggaagatgggaagccaaactccatcatgatgggtggattccaaatgaacccctgcgttagttacaaaggaaaccaatgccacttttgtttataagaccagaaggtagactttctaagcatagatatttattgataacatttcattgtaactggtgttctatacacagaaaacaatttattttttaaataattgtctttttccataaaaaagattactttccattcctttaggggaaaaaacccctaaatagcttcatgtttccataatcagtactttatatttataaatgtatttattattattataagactgcattttatttatatcattttattaatatggatttatttatagaaacatcattcgatattgctacttgagtgtaaggctaatattgatatttatgacaataattatagagctataacatgtttatttgacctcaataaacacttggatatcccaaaaaaaaaaaaaaa

SEQ ID NO: 1429 - protein, 179 aa, Homo sapien; identical to SEQ ID NO: 1332

SEQ ID NO: 1430 - DNA, 3571 bp, Homo sapien
ctcgaaaaggccccatgtgggcagggggtgtggcaggagctcccagcactggagacccacggactcaacccagttacctcacatggggccttttctgagcaaggtctcgaaagcgcaggccgccctggctgagcagcaccgccctttcccagctgcactcgccctgtggacagccccgacacaccactttcctgaggctgtcgctcactcagattgtccgtttgctatgccgaatgcagccaaaattcctttttacaatttgtgatgccttaccgatttgatcttaatcctgtatttaaagttttctaacactgccttatactgtgtttctctttttgggggagcttaactgcttgttgctccctgtcgtctgcaccatagtaaatgccacaagggtagtcgaacacctctctggcccctagacctatctggggacaggctggctcagcctgtctccagggctgctgcggcccagccccgagcctgccccacgtggcgcgcctctgtctgatcagcaccttcctggaggacggcatccgtatgtggttccagtggagcgagcagcgcgactacatcgacaccacctggaactgcggctacctgctggcctcgtccttcgtcttcctcaacttgctgggacagctgactggctgcgtcctggtgttgagcaggaacttcgtgcagtacgcctgcttcgggctctttggaatcatagctctgcagacgattgcctacagcattttatgggacttgaagtttttgatgaggaacctggccctgggaggaggcctgttgctgctcctagcagaatcccgttctgaagggaagagcatgtttgcgggcgtccccaccatgcgtgagagctcccccaaacagtacatgcagctcggaggcagggtcttgctggttctgatgttcatgaccctccttcactttgacgccagcttcttttctattgtccagaacatcgtgggcacagctctgatgattttagtggccattggttttaaaaccaagctggctgctttgactcttgttgtgtggctctttgccatcaacgtatatttcaacgccttctggaccattccagtctacaagcccatgcatgacttcctgaaatacgacttcttccagaccatgtcggtgattgggggcttgctcctggtggtggccctgggccctgggggtgtctccatggatgagaagaagaaggagtggtaacagtcacagatccctacctgcctggctaagacccgtggccgtcaaggactggttcggggtggattcaacaaaactgccagcttttatgtatcctcttcccttcccctcccttggtaaaggcacagatgttttgagaactttatttgcagagacacctgagaatcgatggctcagtctgctctggagccacagtctggcgtctgacccttcagtgcaggccagcctggcagctggaagcctcccccacgccgaggctttggagtgaacagcccgcttggctgtggcatctcagtcctatttttgagtttttttgtgggggtacaggagggggccttcaagctgtactgtgagcagacgcattggtattatcattcaaagcagtctccctcttatttgtaagtttacatttttagcggaaactactaaattattttgggtggttcagccaaacctcaaaacagttaatctccctggtttaaaatcacaccagtggctttgatgttgtttctgccccgcattgtattttataggaatagtgaaaacatttagggacacccaaagaatgatgcagtattaaaggggtggtagaagctgctgtttatgataaaagtcatcggtcagaaaatcagcttggattggtgccaagtgttttattgggtaacaccctgggagttttagtagcttgaggcaaggtggaggggcaagaagtccttggggaagctgctggtctgggtgctgctggcctccaagctggcagtgggaagggctagtgagaccacacaggggtagccccagcagcagcaccctgcaagccagcctggccagctgctcagaccagcttgcagagccgcagccgctgtgggcagggggtgtggcaggagctcccagcactggagacccacggactcaacccagttacctcacatggggccttttctgagcaaggtctcgaaagcgcaggccgccctggctgagcagcaccgccctttcccagctgcactcgccctgtggacagccccgacacaccactttcctgaggctgtcgctcactcagattgtccgtttgctatgccgaatgcagccaaaattcctttttacaatttgtgatgccttaccgatttgatcttaatcctgtatttaaagttttctaacactgccttatactgtgtttctctttttgggggagcttaactgcttgttgctccctgtcgtctgcaccatagtaaatgccacaagggtagtcgaacacctctctggcccctagacctatctggggacaggctggctcagcctgtctccagggctgctgcggcccagccccgagcctgcctccctcttggcctctcatccattggctctgcagggcaggggtgaggcaggtttctgctcataagtgcttttggaagtcacctacctttttaacacagccgaactagtcccaacgcgtttgcaaatattcccctggtagcctacttccttacccccgaatattggtaagatcgagcaatggcttcaggacatgggttctcttctcctgtgatcattcaagtgctcactgcatgaagactggcttgtctcagtgtttcaacctcaccagggctgtctcttggtccacacctcgctccctgttagtgccgtatgacagcccccatcaaatgaccttggccaagtcacggtttctctgtggtcaaggttggttggctgattggtggaaagtagggtggaccaaaggaggccacgtgagcagtcagcaccagttctgcaccagcagcgcctccgtcctagtgggtgttcctgtttctcctggccctgggtgggctagggcctgattcgggaagatgcctttgcagggaggggaggataagtgggatctaccaattgattctggcaaaacaatttctaagatttttttgctttatgtgggaaacagatctaaatctcattttatgctgtattttatatcttagttgtgtttgaaaacgttttgatttttggaaacacatcaaaataaataatggcgtttgttgtatgcagtgtgatcctatagcgttgcccagcctgaatggggctcccctcaggatgccagtgagcgaggttacttctctaggcttctctgaagaccactcagaagccatgtccagagagaattagtccctcagagtccctgctgcttcctgggtgtgggggacagactccctcagccctgccttagagggcagcagatgtcatgagacaaggataagtgggtagagaagacactggggacaacccgatcattcagaggacacacggtttgatcaggagcgggggaaatatctgaaggctttctcgaaacttcacggcatgtgct

SEQ ID NO: 1431 - protein, 152 aa, Homo sapien
MRNLALGGGLLLLLAESRSEGKSMFAGVPTMRESSPKQYMQLGGRVLLVLMFMTLLHFDASFFSIVQNIVGTALMILVAIGFKTKLAALTLVVWLFAINVYFNAFWTIPVYKPMHDFLKYDFFQTMSVIGGLLLVVALGPGGVSMDEKKKEW

SEQ ID NO: 1432 - DNA, 3810 bp, Homo sapien
gctgacggttgctgcacacacagtccccacgtcagatcctgagcttgcaggggagagctccgtcgggctgggaagcgccagccctggtttgcaacagcacacatgcgctgtccagagcctggggcctcctcctgctgctctggagattttcggataactgtaaacgtgatcttactattcagtcaaccatgtggccctctaggtgtggcaccctggctgtcacctaagccaacccttgttctgtcagggtactctgggcgtcactgggcaggctgggaggtccaggcccttggcacctcagccatgtgtgacctgcaggctggggtcaagtcttggcattgcaccatcaggtctgcgaagcctaggggaaccccttcccgctgggtttaatatagccatttgtaaggtgaggggttggaccagagcagcggagatgcctggcaaagtgcagcggtgcctcaggagggaggctgctgctggcatgtcgtgggcagacatgtcgtgcgtcatagcctgcagcacccaggatgacccacggcaaagagtggcctggcctcagatgccagtagtgctgaggtgcagaaacgttggatagatgacctctaagtgccttttcagatgtcattctgtgattccaacttgtaaatgcctttgaccgaaaagagcagctctgtgtcttgtggcagtgccaccttggaagactgtagttgcctgccgaggcactgggggaaatcacggtagcagagtgttagggctgctgccctataggatctgccccagagggcctaacgtcaagtcatgcatctccgggactgatccttggattgttgcatgtgtccagactcacagggtagcgctcaggagcaagcactgagagccccctagtctgccctgggaaggcaccggggctgacaagagctcttgccttccacagcgtctgttcctcacacaccccgcccaaggacgtgcctggcagcggcctggtgctccccgccgcagccacctcacccttgggtttctgtggccctgcagttcctccgtgtcacaaagcagtacctgccccacgtggcgcgcctctgtctgatcagcaccttcctggaggacggcatccgtatgtggttccagtggagcgagcagcgcgactacatcgacaccacctggaactgcggctacctgctggcctcgtccttcgtcttcctcaacttgctgggacagctgactggctgcgtcctggtgttgagcaggaacttcgtgcagtacgcctgcttcgggctctttggaatcatagctactgcagacgattgccttacagcattttatgggacttgaagtttttgatgaggaacctgggccctgggaggaggcctgtgctgctcctagcagaatcccgttctgaagggaagagcatgtttgcgggcgtccccaccatgcgtgagagctcccccaaacagtacatgcagctcggaggcagggtcttgctggttctgatgttcatgaccctccttcacttggacgccagcttcttttctatgtccagaacatcgtgggcacagctctgatgattttagtggccattggttttaaaaccaagctggctgctttgactcttgttgtgcggctctttgccatcaacgtatatttcaacgccttctggaccattccagtctacaagcccatgcatgacttcctgaaatacgacttcttccagaccatgtcggtgattgggggcttgctcctggtggtggccctgggccctgggggtgtctccatggatgagaagaagaaggagtggtaacagtcacagatccctacctgcctggctaagacccgtggcgtcaaggactggttcggggtggattcaacaaaaactgcagcttttatgtatcctcttcccttcccctcccttggtaaaggcacagatgttttgagaactttatttgcagagacacctgagaatcgatggctcagtctgctctggagccacagtctggcgtctgacccttcagtgcaggccagcctggcagctggaagcctcccccacgccgaggctttggagtgaacagcccgcttggctgtggcatctcagtcctatttttgagtttttttgtgggggtacaggagggggccttcaagctgtactgtgagcagacgcattggtattatcattcaaagcagtctccctcttatttgtaagtttacatttttagcggaaactactaaattattttgggtggttcagccaaacctcaaaacagttaatctccctggtttaaaatcacaccagtggctttgatgttgtttctgccccgcattgtattttataggaatactgaaaacatttagggacacccaaagaatgatgcagtattaaaggggtggtagaagctgctgtttatgataaaagtcatcggtcagaaaatcagcttggattggtgccaagtgttttattgggtaacaccctgggagttttagtagcttgaggcaaggtggaggggcaagaagtccttggggaagctgctggtctgggtgctgctggcctccaagctggcagtgggaagggctagtgagaccacacaggggtagccccagcagcagcaccctgcaagccagcctggccagctgctcagaccagcttgcagagccgcagccgctgtgggcagggggtgtggcaggagctcccagcactggagacccacggactcaacccagttacctcacatggggccttttctgagcaaggtctcgaaagcgcaggccgccctggctgagcagcaccgccctttcccagctgcactcgccctgtggacagccccgacacaccactttcctgaggctgtcgctcactcagattgtccgtttgctatgccgaatgcagccaaaattcctttttacaatttgtgatgccttaccgatttgatcttaatcctgtatttaaagttttctaacactgccttatactgtgtttctctttttgggggagcttaactgcttgttgctccctgtcgtctgcaccatagtaaatgccacaagggtagtcgaacacctctctggcccctagacctatctggggacaggctggctcagcctgtctccagggctgctgcggcccagccccgagcctgcctccctcttggcctctcatccattggctctgcagggcaggggtgaggcaggtttctgctcataagtgcttttggaagtcacctacctttttaacacagccgaactagtcccaacgcgtttgcaaatattcccctggtagcctacttccttacccccgaatattggtaagatcgagcaatggcttcaggacatgggttctcttctcctgtgatcattcaagtgctcactgcatgaagactggcttgtctcagtgtttcaacctcaccagggctgtctcttggtccacacctcgctccctgttagtgccgtatgacagcccccatcaaatgaccttggccaagtcacggtttctctgtggtcaaggttggttggctgattggtggaaagtagggtggaccaaaggaggccacgtgagcagtcagcaccagttctgcaccagcagcgcctccgtcctagtgggtgttcctgtttctcctggccctgggtgggctagggcctgattcgggaagatgcctttgcagggaggggaggataagtgggatctaccaattgattctggcaaaacaatttctaagattttttgctttatgtgggaaacagatctaaatctcattttatgctgtattttatatcttagttgtgtttgaaaacgtttgattttggaaacacatcaaaataaataatggc

SEQ ID NO: 1433 - protein, 51 aa, Homo sapien
LTVAAHTVPTSDPELAGESSVGLGSASPGLQQHTCAVQSLGPPPAALEIFG

SEQ ID NO: 1434 - DNA, 1577 bp, Homo sapien
ggcggagagggccggccgccggcacattcctgtggaggccgcagcgggtgcggcgccgacgggaggagcagcgagcgagcgacgaacgccgagccgagcctcccgccgtcgccatgggccagaacgacctgatgggcacggccgaggacttcgccgaccagttcctccgtgtcacaaagcagtacctgccccacgtggcgcgcctctgtctgatcagcaccttcctggaggacggcatccgtatgtggttccagtggagcgagcagcgcgactacatcgacaccacctggaactgcggctacctgctggcctcgtccttcgtcttcctcaacttgctgggacagctgactggctgcgtcctggtgttgagcaggaacttcgtgcagtacgcctgcttcgggctctttggaatcatagctctgcagacgattgcctacagcattttatgggacttgaagtttttgatgaggaacctggccctgggaggaggcctgttgctgctcctagcagaatcccgttctgaagggaagagcatgtttgcgggcgtccccaccatgcgtgagagctcccccaaacagtacatgcagctcggaggcagggtcttgctggttctgatgttcatgaccctccttcactttgacgccagcttcttttctattgtccagaacatcgtgggcacagctctgatgattttagtggccattggttttaaaaccaagctggctgctttgactcttgttgtgtggctctttgccatcaacgtatatttcaacgccttctggaccattccagtctacaagcccatgcatgacttcctgaaatacgacttcttccagaccatgtcggtgattgggggcttgctcctggtggtggccctgggccctgggggtgtctccatggatgagaagaagaaggagtggtaacagtcacagatccctacctgcctggctaagacccgtggccgtcaaggactggttcggggtggattcaacaaaactgccagcttttatgtatcctcttcccttcccctcccttggtaaaggcacagatgttttgagaactttatttgcagagacacctgagaatcgatggctcagtctgctctggagccacagtctggcgtctgacccttcagtgcaggccagcctggcagctggaagcctcccccacgccgaggctttggagtgaacagcccgcttggctgtggcatctcagtcctatttttgagtttttttgtgggggtacaggagggggccttcaagctgtactgtgagcagacgcattggtattatcattcaaagcagtctccctcttatttgtaagtttacatttttagcggaaactactaaattattttgggtggttcagccaaacctcaaaacagttaatctccctggtttaaaatcacaccagtggctttgatgttgtttctgccccgcattgtattttataggaatactgaaaacatttagggacacccaaagaatgatgcagtattaaaggggtggtagaagctgctgtttatgataaaagtcatcggtcagaaaaaaaaaaaaaaaaaaaaaaaaaaaaaaaaa

SEQ ID NO: 1435 - protein, 269 aa, Homo sapien
MGQNDLMGTAEDFADQFLRVTKQYLPHVARLCLISTFLEDGIRMWFQWSEQRDYIDTTWNCGYLLASSFVFLNLLGQLTGCVLVLSRNFVQYACFGLFGIIALQTIAYSILWDLKFLMRNLALGGGLLLLLAESRSEGKSMFAGVPTMRESSPKQYMQLGGRVLLVLMFMTLLHFDASFFSIVQNIVGTALMILVAIGFKTKLAALTLVVWLFAINVYFNAFWTIPVYKPMHDFLKYDFFQTMSVIGGLLLVVALGPGGVSMDEKKKEW

SEQ ID NO: 1436 - DNA, 3712 bp, Rattus norvegicus
ccggttcccgcggtcgcagctccagccgcctcctccgcgcagccgccgcctcagctgctcgctctgtgggtcggtcctctccggcacttgggctccagtcgcgccctccaagcccttcaggccgccccagtgtcctcctccttctccggccagacccagccccgcgaagatggtggaccgcgagcaactggtgcagaaagcccggctggccgagcaggcggagcgctacgacgacatggccgcggccatgaagaacgtgacagagctgaatgagccactgtcgaatgaggaacgaaaccttctgtctgtggcctacaagaacgttgtgggggcacgccgctcttcctggagggtcatcagtagcattgagcagaagacatctgcagacggcaatgagaagaagattgagatggtccgtgcgtaccgggagaagatagagaaggagttggaggctgtgtgccaggatgtgctgagcctgctggataactacctgatcaagaattgcagcgagacccagtacgagagcaaagtgttctacctgaagatgaaaggggactactaccgctacctggctgaagtggccaccggagagaaaagggcgacggtggtggagtcctccgagaaggcctacagcgaagcccacgagatcagcaaagagcacatgcagcccacccaccccatccgattaggcctggctcttaactactccgtcttctactatgagatccagaacgccccagagcaagcgtgccacttggccaagaccgcgttcgacgacgccatcgccgagcttgacaccctcaacgaggactcctacaaggactccacgctcatcatgcagctcctccgcgacaacctcacgctctggacgagcgaccagcaggacgacgatggcggcgaaggcaacaattaaggccccaggggaactggcagcgcacgcggatgctactactgcagtctttatttttttcccatgagttgggggtcgggtgggggagggaaagggagggatgaccttcccagggagaaacccacgacctgtcctgtctttgatcgcctctttgacatttttgccaaaataccactagtggaaagtcaggctagctgtgctggtattggaatagcagcctcacactggcgtctggactgttctgtagattcatgcaagtggagctgtctgtctctaatttaacttattgctagataatagggttttcagatgaaaagaaaacttaaagaggaatggccctcattcagtaagttctgtggttccagtaaggatttttatgtacatacgctctcgtctctcgttttgggtactttctatctcatctgtctcggctctgcatgttttccagggtgtagcctacagacatggaacagtgtaaatcccagactgacagacttagaacctgaggtctcattcatccttatggtttaggccttgccagttttccgaagtctctgattagttgacagtattaacactaaattgcagtttacagtatttctacattacagccatatgtaacatcaagccatcgattgtgtacttttcctttgctagttgtttgggctttaacatccttattcagccttatccaggttggttttgctgttgatcggtctcctaggctaaatgagaatgaaagcgacttcaggtttttggttcataggtgctcggcaggtggctgtgggatttttttttttggtccttctttcctcttaacgtaaatccaccaccaaaattattaatcctcttgagagaaacgtgaaacgccacaaaaatagagaaaattcaggtctgtatgtcatggatcgtgttggtattttcagagaacatcccgcttctgaagctgctgcagctccctcctcagggatcacactgccgtcacccactctgcactggggcgtttcctactgcgcctcgtgctggcggacgcagctgggtgcagaagctgtggggtcggagaggcgtttggagaaggtctgtggtgcagtgtgtgaaaattcaggtgctagaagcctactggtagaaaaacccaaaaggaagagctatatccttaaccattctgtccaatttcgggagccttgtcagtgtgtcagtttttcctccccgaagacactccttccccaagtaattgtaggaagataaaaaaactgttaccagataacaaacacttaactcctatttgaccagaactttttcctctcgagatagttttttctttttaatgaaaaaagcataggaattggagattggcttgtctcacgcagccagtgcacatttggaattgacggaaacaacgttgctatttccacccatttgttttcggcagccttaaggccctcattctcatttcgggtgaatctgtctatctgtgaacgtggcccgcatgtgcattcttttttttatatatataaagtcagtgacgaggcactcccgagacgtgtaatgacaccacacttgttttctttgtttctttgttttatttaggcaagaagaggtgtgagtaattgaggaaaaactgacagatgcttttgctaataccaaaattgagcttacaattaggaactgagtatgtgtaacaggatacaggtgacagtgaagatagaagaaccacgatgaccacagactcaatgtgctctgtaacatcgcacagtttacccagcatgactttccttaggaggccccctcctcacgctagagtaaaagtcccagttaagtgaagcctaccagaagaactagtagaagaagctttgccgcttttgtgcctctcacaggcgcctaaagtcattgccatgggaggaagacgatttggggggggagggggggggcagggtaggtggggctttccctaatttatcttcatgtccagtgagcagtgttgcgtttttccttgtagcatttggaaatgatttactggaattacaaaacctatttttcctttaaatttcagctttggctctggctgctttttagaataatgcaagataaaaatcacacctgagggctgaaaacggagagggaatgggagacttgatatttaagcagcttgaatggtttttcttttctttatttttaaagaaatgcacttgcctatgatactgtctctccagtgaaatgattactcctccattactctattgatacaatattgtgcatgctagtgttgtatttctatacagtagcttgaaattgattaacttatactgtaggtgttatgtattcctatgacaaaaaaaattaagtcttcaaattttttaaaggttttttttttttaatttaatttttccttttgggggtaaagtttgctctaccaaatagtgattgtaacaaattgatctgttttggatgttgctatagtgacatgcagttatatattttgtttttaaaagggggggagcaaaagaaacaccagtgttagcttaatcttaatgtctggtgtttgtcatggtgaaattataactattacagtgttggagaacaacaaatatgttctctgaatgagcctttgtgctttttgtcatgttatgcagtgaactatttttaaggtctaatcagtgattatttttccagctccgtgtttctctaaggaattatttcacacacggaccatctttagcagtttcctcagtgatggaatatcatgaatgtgagtcattatgtagctgtcgtacattgagcaaataaacttacagatctgacgcc

SEQ ID NO: 1437 - protein, 247 aa, Rattus norvegicus
MVDREQLVQKARLAEQAERYDDMAAAMKNVTELNEPLSNEERNLLSVAYKNVVGARRSSWRVISSIEQKTSADGNEKKIEMVRAYREKIEKELEAVCQDVLSLLDNYLIKNCSETQYESKVFYLKMKGDYYRYLAEVATGEKRATVVESSEKAYSEAHEISKEHMQPTHPIRLGLALNYSVFYYEIQNAPEQACHLAKTAFDDAIAELDTLNEDSYKDSTLIMQLLRDNLTLWTSDQQDDDGGEGNN

SEQ ID NO: 1438 - DNA, 1059 bp, Homo sapien
atggcattggcgtccgggcccgcaagcgctaagcatggctccgggcagctcggccttgggggcttcggggcccgagacgcggggtatgagtggggcgtgcgctccacgcggaagtcggagcctcctcccctggatagggtgtacgagatccctggactggagcccatcacctttgcggggaagatgcacttcgtgccctggctggcgcggccgatctttccgccctgggaccgcggctacaaggacccaaggttctaccgctcgccccctcttcacgagcatccgctgtacaaagaccaggcctgctatatctttcaccaccgttgccgccttctcgagggtgtaaagcaggccctctggctcaccaagaccaagttaatagaaggccttcccgagaaagtgcttagccttgttgatgatccaaggaaccacatagagaaccaagacgagtgcgttctgaatgtgatctctcacgcccgtctctggcagaccactgaggaaatccccaagagagagacctactgcccggtcatcgtggacaacctaatacagctgtgtaaatctcagattctcaagcatccttctctggccaggaggatctgtgtccaaaactccacgttttctgctacctggaaccgagagtctcttctccttcaagtccgtggttctggtggagcccgactgagcactaaggatcctctgcccaccatcgcctccagagaggagattgaagctactaagaatcatgttctagagaccttctaccccatatcacccatcatcgatcttcatgaatgcaatatttatgatgtgaaaaatgacacaggattccaggaaggctatccttacccctatccccataccctgtacttactggacaaagccaatttacgaccacaccgccttcaaccagatcagctgcgggccaagatgatcctgtttgcttttggcagtgccctggctcaggcccgctcctctatgggaatgatgccaaggtcttggagcagcccgtggtggtgcagagcgtgggcacggatggacgtgtcttccatttcctag

SEQ ID NO: 1439 - protein, 352 aa, Homo sapien
MALASGPASAKHGSGQLGLGGFGARDAGYEWGVRSTRKSEPPPLDRVYEIPGLEPITFAGKMHFVPWLARPIFPPWDRGYKDPRFYRSPPLHEHPLYKDQACYIFHHRCRLLEGVKQALWLTKTKLIEGLPEKVLSLVDDPRNHIENQDECVLNVISHARLWQTTEEIPKRETYCPVIVDNLIQLCKSQILKHPSLARRICVQNSTFSATWNRESLLLQVRGSGGARLSTKDPLPTIASREEIEATKNHVLETFYPISPIIDLHECNIYDVKNDTGFQEGYPYPYPHTLYLLDKANLRPHRLQPDQLRAKMILFAFGSALAQARSSMGMMPRSWSSPWWCRAWARMDVSSIS

SEQ ID NO: 1440 - DNA, 3445 bp, Homo sapien
aagtgctggtgccctctgccgctgctcccgtctctttggttacgctcgtcagccggtcggccgccgcctccagccgtgtgccgctatgggagtcccggcgttcttccgctggctcagccgcaagtacccgtccatcatagtcaactgcgtggaagagaagccaaaagaatgcaatggtgtaaagattccagttgatgccagtaaacctaatccaaatgatgtggagtttgataatctgtatttggatatgaatggaatcatccatccctgtactcatcctgaagacaaaccagcaccaaaaaatgaagatgaaatgatggttgcaatttttgagtacattgacagacttttcagtattgtaagaccaagaagacttctctacatggcaatagatggagtggcaccacgtgctaaaatgaaccagcagcgttcaaggaggttcagggcatcaaaagaaggaatggaagcagcagtcgagaagcagcgagtcagggaagaaatattggcaaaaggtggctttcttcctccagaagaaataaaagaaagatttgacagcaactgtattacaccaggaactgaattcatggacaatcttgctaaatgccttcgctattacatagctgatcgtttaaataatgaccctgggtggaaaaatttgacagttattttatctgatgctagtgctcctggtgaaggagaacataaaatcatggattacattagaaggcaaagagcccagcctaaccatgacccaaatactcatcattgtttatgtggagcagatgctgatctcattatgcttggccttgccacacatgaaccgaactttaccattattagagaagaattcaaaccaaacaagcccaaaccatgtggtctttgtaatcagtttggacatgaggtcaaagattgtgaaggtttgccaagagaaaagaagggaaagcatgatgaacttgccgatagtcttccttgtgcagaaggagagtttatcttccttcggcttaatgttcttcgtgagtatttggaaagagaactcacaatggccagcctaccattcacatttgatgttgagaggagcattgatgactgggttttcatgtgcttctttgtgggaaatgacttcctccctcatttgccatcgttagagattagggaaaatgcaattgaccgtttggttaacatatacaaaaatgtggtacacaaaactgggggttaccttacagaaagtggttatgtcaatctgcaaagagtacagatgatcatgttagcagttggtgaagttgaggatagcatttttaaaaagagaaaggatgatgaggacagttttagaagacgacagaaagaaaaaagaaagagaatgaagagagatcaaccagctttcactcctagtggaatattaactcctcatgccttgggttcaagaaattcaccaggttctcaagtagccagtaatccgagacaagcagcctatgaaatgaggatgcagaataactctagtccttcgatatctcctaatacgagtttcacatctgatggctccccgtctccattaggaggaattaagcgaaaagcagaagacagtgacagtgaacctgagccagaggataatgtcaggttatgggaagctggctggaagcagcggtactacaagaacaaatttgatgtggatgcagctgatgagaaattccgtcggaaagttgtgcagtcgtacgttgaaggactttgctgggttcttagatattattaccagggctgtgcttcctggaagtggtattatccatttcattatgcaccatttgcttcagactttgaaggcattgcagacatgccatctgattttgagaagggtacgaaaccgtttaaaccactagaacaacttatgggggtatttccagctgcaagtggtaattttctacctccatcatggcggaagctcatgagtgatcctgattctagtataattgacttctatcctgaagattttgctattgatttgaatgggaagaaatatgcatggcaaggtgttgctctcttgccattcgtggatgagcgaaggctacgagctgccctagaagaggtatacccagacctcactccagaagagaccagaagaaacagccttggaggtgatgtcttatttgtggggaaacatcacccactccatgacttcattttagagctgtaccagacaggttccacagagccagtggaggtaccccctgaactatgtcatgggattcaaggaaagttttctttggatgaagaagccattcttccagatcaaatagtatgttctcctgttcctatgttaagggatctgacacagaacactgtagtcagtattaattttaaagacccacagtttgctgaagattacatttttaaagctgtaatgcttccaggagcaagaaagccagcagcagtactgaaacctagtgactgggaaaaatccagcaatggacggcagtggaagcctcagcttggctttaaccgtgaccggaggcctgtgcacctggatcaggcagccttcaggactttgggccatgtgatgccaagaggctcaggaactggcatttacagcaatgctgcaccaccacctgtgacttaccagggaaacttatacaggccgcttttgagaggacaagcccagattccaaaacttatgtcaaatatgaggccccaggattcctggcgaggtcctcctccccttttccagcagcaaaggtttgacagaggcgttggggctgaacctctgctcccatggaaccggatgctgcaaacccagaatgcagccttccagccaaaccagtaccagatgctagctgggcctggtgggtatccacccagacgagatgatcgtggagggagacagggatatcccagagaaggaaggaaataccctttgccaccaccctcaggaagatacaattggaattaagcttttgtaaagctttcccaaatcctttcatcattctacagttttatgctatttgtggaaagatttctttctcaagtagtagtttttaataaaactacagtactttgtgtatttcttttaactgtgtatatttctactgatctgatctcactgtttatgttgctttccaaagatgtatgttgcataatacagtggatctgaatttattattgcttataaaacacatttgatggaataggagtactggtttttcataatggttaaaaatgaaaccagctgtggatttcaaaacacagtgtattctagatcatctaagatccatgctgatttttattgcacaagaattaggtttgaactcttgagctggaacctcagcaaactagagtatatattgttcagtatttctttggaaacatttcattaatgtacttgtcttacagaaatttctgaactttagtaaaaaaaaataaagttaaacttttaaaactcaaaaaaaaaaaaaaaaaa

SEQ ID NO: 1441 - protein, 950 aa, Homo sapien
MGVPAFFRWLSRKYPSIIVNCVEEKPKECNGVKIPVDASKPNPNDVEFDNLYLDMNGIIHPCTHPEDKPAPKNEDEMMVAIFEYIDRLFSIVRPRRLLYMAIDGVAPRAKMNQQRSRRFRASKEGMEAAVEKQRVREEILAKGGFLPPEEIKERFDSNCITPGTEFMDNLAKCLRYYIADRLNNDPGWKNLTVILSDASAPGEGEHKIMDYIRRQRAQPNHDPNTHHCLCGADADLIMLGLATHEPNFTIIREEFKPNKPKPCGLCNQFGHEVKDCEGLPREKKGKHDELADSLPCAEGEFIFLRLNVLREYLERELTMASLPFTFDVERSIDDWVFMCFFVGNDFLPHLPSLEIRENAIDRLVNIYKNVVHKTGGYLTESGYVNLQRVQMIMLAVGEVEDSIFKKRKDDEDSFRRRQKEKRKRMKRDQPAFTPSGILTPHALGSRNSPGSQVASNPRQAAYEMRMQNNSSPSISPNTSFTSDGSPSPLGGIKRKAEDSDSEPEPEDNVRLWEAGWKQRYYKNKFDVDAADEKFRRKVVQSYVEGLCWVLRYYYQGCASWKWYYPFHYAPFASDFEGIADMPSDFEKGTKPFKPLEQLMGVFPAASGNFLPPSWRKLMSDPDSSIIDFYPEDFAIDLNGKKYAWQGVALLPFVDERRLRAALEEVYPDLTPEETRRNSLGGDVLFVGKHHPLHDFILELYQTGSTEPVEVPPELCHGIQGKFSLDEEAILPDQIVCSPVPMLRDLTQNTVVSINFKDPQFAEDYIFKAVMLPGARKPAAVLKPSDWEKSSNGRQWKPQLGFNRDRRPVHLDQAAFRTLGHVMPRGSGTGIYSNAAPPPVTYQGNLYRPLLRGQAQIPKLMSNMRPQDSWRGPPPLFQQQRFDRGVGAEPLLPWNRMLQTQNAAFQPNQYQMLAGPGGYPPRRDDRGGRQGYPREGRKYPLPPPSGRYNWN

SEQ ID NO: 1442 - DNA, 4175 bp, Homo sapien
cggggccgaggcggaggagcggccgccgcgccggggcccagccggagccgccgccctcgcccttgcctttgcctgcgcggctcagaatcaccatccgcggcggggagacgagccggccgtcccgggccgggggacccgcccgccatggccaccaaggctcgggttatgtatgattttgctgctgaacctggaaataatgaactgacggttaatgaaggagaaatcatcacaatcacaaatccggatgtaggtggaggatggctggaaggaagaaacatcaaaggagaacgagggctggttcccacagactacgttgaaattttacccagtgatggaaaagatcaattttcttgtggaaattcagtggctgaccaagccttccttgattctctctcagccagcacagctcaggccagttcgtcggctgccagcaacaatcaccaggttggcagtggcaatgacccctggtcagcctggagtgcctccaaatctgggaactgggaaagctcagaaggctggggggcccagccagagggggctggagcccaaagaaacacaaacactcccaacaactgggacactgccttcggccacccccaggcctaccaaggaccagcaactggtgatgatgatgactgggatgaagactgggatgggcccaaatcctcttcctactttaaggattcagagtcagctgatgcaggcggcgctcagcgaggaaacagtcgtgctagttcctcatccatgaaaattccccttaacaaatttcctggatttgcgaaacctggcacggaacagtatttgttggccaaacaactagcaaaacccaaagagaaaattcccatcattgttggagattatggcccaatgtgggtttatcctacctctacttttgactgtgtggtagcagatcccaggaaaggctccaaaatgtatggtctaaagagctacatcgaatatcagctaacacctactaacactaatcgatctgtaaaccacaggtataagcactttgactggttatatgagcgtctcctggttaagtttgggtcagccattccaatcccttctcttccagacaaacaagtcacaggccgctttgaagaggaatttatcaaaatgcgcatggagagacttcaggcctggatgaccaggatgtgtcgccatccagtaatctcagaaagtgaagttttccagcagttcctaaatttccgagatgagaaggaatggaaaactggaaagaggaaggccgagagagatgagctggcgggagtcatgatattttccaccatggaaccagaggcacctgacttggacttagtagaaatagagcagaagtgcgaggctgtggggaagttcaccaaggccatggatgacggcgtgaaggagctgctgacggtggggcaggagcactggaagcgctgcacgggcccattacccaaggaatatcagaagataggaaaggccttgcagagtttggccacagtgttcagttccagtggctatcaaggtgaaacagatctcaatgatgcaataacagaagcaggaaagacttatgaagaaattgccagtctcgtggcagaacagccaaagaaagatctccatttcctgatggaatgtaatcacgagtataaaggttttcttggctgcttccctgacatcattggcactcacaagggagcaatagaaaaagtgaaagaaagtgacaaactagttgcaacaagtaaaatcaccctacaagacaaacagaacatggtgaagagagtcagcatcatgtcttacgcgttgcaagctgagatgaatcactttcacagtaaccggatctatgattacaacagtgtcatccgcctgtacctggagcagcaagtgcaattttacgaaacgattgcagaaaagctgaggcaggccctcagccgctttccagtgatgtaggacagaacgggccttgaagagaatgccgcgtgctttctcctgacttggggcaatgcaattcaaaacttttttcccctattattcagaaaaaaaaggaaacaaaaccaaaaagaaagagttgcaaaaaactgcatttattttattagccaccctaaatgcgtcagttatttagggatggtcttttgttcatttccgcatccattatttaaaccagtggaaattgtctctatttttggaaagtacttaaaagttaccagaattttcaatggaaaatgaggggtttctccccactgatattttacatagagtcataatttatatgtcttataaattataagtcttatataatttataagtctcccacaatcttccagttcttacccagtgtcagataattaattactaattactttcttaaaaacatgaactatgccagaataaaaaatatctatgtttgtatatttttataactcctttcagtcctctggggctcctgtcattgagggaagtcgttacgcctttcactgccacagttacagctcaagtgcttacacttcaagagggaggacgctgggggcccctggggtgactagtgccatcgtgggtgtgtgggcaggtgggccatcccatgtccctccaggggaccccacagcctggcagatgagcagatacccctggccacccatgtcctcagcgacatttctgatgtgctgctcttatgtgaggaccagtgctttctctctttgcacttccttcctaatcttggttaaggcatgttttatgccatgaagaatacattagaagaattgagggactttgtagagaattttgtggctttggtccgacgggtgagtggctgtgcggaggcctgtgttcgggagggcctgggggaaggagggcacccagcaccccggcgtctctggccctttcttattctttggctcctcatccaccgtgatgagaagcgctgctgtggccacggcacactgcttggcttgggtggcgggttcatggccagttggtgtcatcagcaaagagaaaaagcacaggttagctccccattagatggaaaagtgtagggactgagaagggctgcagcctcagcagtgtacagagtccccggcgctctgaggttggagagaaagaacagaccagcgcccttcctgactacatccgaaacttcacacagggtgtttctgagcaccagcacttccagcgcttcacttaacggcataaagcaaaacaggaccttggcacaccgtcagctcgaactcaacactggcagccaccgtctcacccctgcggaggagcgctcccgtctcccacaggtgccttaccgcgttccctcccgctgctttcatttttctgaccttaataattacgggaaatggaaagtctgggccagcatcaataaaatgacaccaaaaataagtagatgaaatcaaatgaatatgagaacatcttgttcttcaatatcacgggtttttgttaatgtttcataagtaattctccccacttgatttttcttctataaaatcccatagaacaatgtttatgctatagccatttaatatatgtacaaattgtaaagaatatgtataaatgttttacacgaatgtaagagcatgtagaagccaacatataaataaattgtttaaaaaaactgtacagtaaattctcaaatcactttttcaaaacactttttggactttgtgtgtgatttttgttgttgttgttaagtactttttattccagctgctgaaaatggtccaggtaatgaattcttccccaaatcctatttcttctgacatgaattcatcatttcagttccgtaggtcaagtgttgcggtccgggaagcgtatcataaccacctgggaagttgccaatgaagcagacaagtctcccagtgtctgactctcggatatttggatttgactggtgtgaggcaaagtgaaaaagggatgggggaaatggagatggcacgggctcctcagagcgtggtagccgacttgaggaaaagcagagggaatgtgaaagaaaataagagaatccacgggatttgatgcctggaagattctccttcaagtggcaacatggcatatatatccttctccggggagtcacatgcaccatttggttcttagatacgttgatgttttgatttttaatgatttgtatcaacctgtaggtaccacagaagagctgtagtcatacaatcacataacttttacaaatatagtgg

SEQ ID NO: 1443 - protein, 595 aa, Homo sapien
MATKARVMYDFAAEPGNNELTVNEGEIITITNPDVGGGWLEGRNIKGERGLVPTDYVEILPSDGKDQFSCGNSVADQAFLDSLSASTAQASSSAASNNHQVGSGNDPWSAWSASKSGNWESSEGWGAQPEGAGAQRNTNTPNNWDTAFGHPQAYQGPATGDDDDWDEDWDGPKSSSYFKDSESADAGGAQRGNSRASSSSMKIPLNKFPGFAKPGTEQYLLAKQLAKPKEKIPIIVGDYGPMWVYPTSTFDCVVADPRKGSKMYGLKSYIEYQLTPTNTNRSVNHRYKHFDWLYERLLVKFGSAIPIPSLPDKQVTGRFEEEFIKMRMERLQAWMTRMCRHPVISESEVFQQFLNFRDEKEWKTGKRKAERDELAGVMIFSTMEPEAPDLDLVEIEQKCEAVGKFTKAMDDGVKELLTVGQEHWKRCTGPLPKEYQKIGKALQSLATVFSSSGYQGETDLNDAITEAGKTYEEIASLVAEQPKKDLHFLMECNHEYKGFLGCFPDIIGTHKGAIEKVKESDKLVATSKITLQDKQNMVKRVSIMSYALQAEMNHFHSNRIYDYNSVIRLYLEQQVQFYETIAEKLRQALSRFPVM

SEQ ID NO: 1444 - DNA, 4175 bp, Homo sapien; identical to SEQ ID NO: 1442

SEQ ID NO: 1445 - protein, 595 aa, Homo sapien; identical to SEQ ID NO: 1443

SEQ ID NO: 1446 - DNA, 3118 bp, Homo sapien
agttcgacacaccatgccgactgtcagcgtgaagcgtgatctgctcttccaagccctgggccgcacctacactgacgaagaatttgatgaactatgttttgaatttggtctggagcttgatgaaattacatctgagaaggaaataataagtaaagaacaaggtaatgtaaaggcagcaggagcctctgatgttgttctttacaaaattgacgtccctgccaatagatatgatctcctgtgtctggaaggattggttcgaggacttcaggtcttcaaagaaaggataaaggctccagtgtataaacgggtaatgcctgatggaaaaatccagaaattgattatcacagaagagacagctaagatacgtccttttgcggtagcagcagttctccgtaatataaagtttactaaagatcgatatgacagcttcattgaacttcaggagaaattacatcagaatatttgcaggaaaagagcactggttgccattggtacccatgatttggacactttgtcgggcccatttacttatactgcaaagcgtccttcagatatcaaattcaagcctctaaataagaccaaggagtatacagcctgtgaactgatgaacatatacaagactgacaatcacctgaaacattatttacatatcattgaaaacaaacccctgtatccagttatctatgatagcaatggtgtcgtcctttcaatgcctcccatcatcaatggggatcattccagaataacagtaaatactagaaatatttttattgaatgcacgggaactgactttactaaggcaaaaatagttcttgatattattgtcaccatgttcagtgaatattgtgagaatcaatttacggtcgaagctgctgaagtggtttttcctaatggaaaatcacatacctttccagaattagcttaccgaaaggagatggtgagagctgacctaattaacaaaaaagttggaatcagagaaactccagaaaatcttgccaaacttctgaccaggatgtatttaaaatcagaagtcataggtgatgggaatcagattgagattgaaatccctccaaccagagctgacattatccatgcatgtgatattgtagaagatgcagctattgcttatggatataacaacattcagatgactctcccgaaaacttacaccatagctaatcaatttcctcttaataagctcactgaacttctccgacatgacatggcagccgctggcttcactgaagcacttacctttgccctgtgctcccaagaagatattgctgataaactaggtgtggatatctctgcaacaaaggcagtccacataagtaatcctaaaacagctgaatttcaggtggcacgcactacccttcttcctggcctcctgaagaccatagcagcaaatcgtaagatgccccttccactgaaactgtttgaaatctctgacattgtaataaaagattctaatacagatgtaggtgcaaaaaactacagacatctctgtgctgtttattacaacaagaatcctgggtttgagatcattcatgggctgctggacagaattatgcagttgctcgatgtgcctcctggtgaagacaaggggggatatgtgatcaaagcatcagaagggcctgctttcttccccgggcgatgtgcagagatctttgccagggttcaaagcgtcgggaagcttggggtccttcatcctgacgttatcaccaaatttgagctgaccatgccctgctcctccctagaaatcaatattggaccctttttgtgaagattggtctctgtggtgtgattctcttcccaggtgtccctttctcctcccctagtgtccttaagtcctcctccacagggaacatctatttgggctttgatgtttaataaagtagaaagcactgtctggctgtgtgggtagagaccatcctttccctgcatattaggccagcttgtgccatataccagtgtggtgtctgtgtgtgaagctgcattgttgggtaaaagccccgtggagtgctggagaaatgcactagcagagtgcaggatctgttctgaaaggcagacgtgctcctcagacatcagaacatcacattggaacggattactcctgcataacaagatcccatttctttccttattgataaaacaagataatcgatgagaattcatgttgcatgagttcgagataactgaggggtttagctttgattttctacatttgacatgtattcatcattgagaaacactaaaataacaatatttttagaaaacgtttaagaatcaattatggtccaacaattatagcttctgaggtcagtttaaagtgaaagaaaaatctgtaatacaaggattcaaaatatgtgagggtgcataggtattttttactctatctgtgatactctaagatagagtacatgcaacaaagatctgttctgctgtaagagttaaaatggacaagtattgatatcaatgcagtatgaacattaggaaacaatgagaagcttatttttgccataggccatacatgttactgtaatcagtcagttataaaatcatggttttaaatacttaattgagctactagtttctctattgtcccagggagatattagacctctctttttctgaagctaagcttcagccaatcctccttgttttatatcctaatttcctttcttacttcaatctagaattctccagtaggtaccatctctggaaaaaagctgggtctcatgtttgagacaagttcccaggtactattgaagtaataagaaatatgataaaatataatactttaaagtcccagtagaaatagctaacaaaggctgggtgcgctgtggctcatgcctgtaatcctagcactttgggaggctgaggtgggcagatcacttgaggccaatagttcgagatcagcctgaccaacatgatgaaatgccatctccactaaaaatataaaaattagccaggcatggtggtgtgggcctgcagtcccagctacctgggaggctgagtcaggaaaatctcttgaaccaggaggtggacgttgcagtgatcccagattgtgccactgccctccagcctgggtgacagagtgagattctgtctacaaaaa

SEQ ID NO: 1447 - protein, 589 aa, Homo sapien
MPTVSVKRDLLFQALGRTYTDEEFDELCFEFGLELDEITSEKEIISKEQGNVKAAGASDVVLYKIDVPANRYDLLCLEGLVRGLQVFKERIKAPVYKRVMPDGKIQKLIITEETAKIRPFAVAAVLRNIKFTKDRYDSFIELQEKLHQNICRKRALVAIGTHDLDTLSGPFTYTAKRPSDIKFKPLNKTKEYTACELMNIYKTDNHLKHYLHIIENKPLYPVIYDSNGVVLSMPPIINGDHSRITVNTRNIFIECTGTDFTKAKIVLDIIVTMFSEYCENQFTVEAAEVVFPNGKSHTFPELAYRKEMVRADLINKKVGIRETPENLAKLLTRMYLKSEVIGDGNQIEIEIPPTRADIIHACDIVEDAAIAYGYNNIQMTLPKTYTIANQFPLNKLTELLRHDMAAAGFTEALTFALCSQEDIADKLGVDISATKAVHISNPKTAEFQVARTTLLPGLLKTIAANRKMPLPLKLFEISDIVIKDSNTDVGAKNYRHLCAVYYNKNPGFEIIHGLLDRIMQLLDVPPGEDKGGYVIKASEGPAFFPGRCAEIFARVQSVGKLGVLHPDVITKFELTMPCSSLEINIGPFL

SEQ ID NO: 1448 - DNA, 1090 bp, Homo sapien
gctccgggagacttccggcagggcgggcgcggggtcttggcgaacggtcttcggaagcggcggcggcgcgatgaccacgctacgggcctttacctgcgacgacctgttccgcttcaacaacattaacttggatccacttacagaaacttatgggattcctttctacctacaatacctcgcccactggccagagtatttcattgttgcagaggcacctggtggagaattaatgggttatattatgggtaaagcagaaggctcagtagctagggaagaatggcacgggcacgtcacagctctgtctgttgccccagaatttcgacgccttggtttggctgctaaacttatggagttactagaggagatttcagaaagaaagggtggattttttgtggatctctttgtaagagtatctaaccaagttgcagttaacatgtacaagcagttgggctacagtgtatataggacggtcatagagtactattcggccagcaacggggagcctgatgaggacgcttatgatatgaggaaagcactttccagggatactgagaagaaatccatcataccattacctcatcctgtgaggcctgaagacattgaataaccctgggcagtggttcttaggcagatactctagatgctttatggacaatattattttcattggatgattctggagctctattaggagaaaagtaatcattttaggtcttaaagacttcaagaaaatacaggttatcaatttattttaaatctcattgtttccagttagcaatatcatacctattaaagctgttcattgtaacaaaattcaatcaaaaaggcagctaggtcagaaggaaacataccactctcatggttcatagtattcactgtatgtatgctagggaaaagacttgctccagtctcctcctcagttctgtgcctgagaaccactgctgcatatatttgtttttaaattttgtattgaactgttaattgaagctttaaaagcatatatgaaatgtataaatctaagatgtataatacattattgactctaaaaaaaaaaaaaaaaaaaaaaaaaaaaaaaaaaaaaaaaaaaaaa

SEQ ID NO: 1449 - protein, 178 aa, Homo sapien
MTTLRAFTCDDLFRFNNINLDPLTETYGIPFYLQYLAHWPEYFIVAEAPGGELMGYIMGKAEGSVAREEWHGHVTALSVAPEFRRLGLAAKLMELLEEISERKGGFFVDLFVRVSNQVAVNMYKQLGYSVYRTVIEYYSASNGEPDEDAYDMRKALSRDTEKKSIIPLPHPVRPEDIE

SEQ ID NO: 1450 - DNA, 3333 bp, Homo sapien
acgcgtccgagctggctcagggcgtccgctaggctcggacgacctgctgagcctcccaaaccgcttccataaggctttgcctttccaacttcagctacagtgttagctaagtttggaaagaaggaaaaaagaaaatccctgggccccttttcttttgttctttgccaaagtcgtcgttgtagtctttttgcccaaggctgttgtgtttttagaggtgctatctccagttccttgcactcctgttaacaagcacctcagcgagagcagcagcagcgatagcagccgcagaagagccagcggggtcgcctagtgtcatgaccagggcgggagatcacaaccgccagagaggatgctgtggatccttggccgactacctgacctctgcaaaattccttctctaccttggtcattctctctctacttggggagatcggatgtggcactttgcggtgtctgtgtttctggtagagctctatggaaacagcctccttttgacagcagtctacgggctggtggtggcagggtctgttctggtcctgggagccatcatcggtgactgggtggacaagaatgctagacttaaagtggcccagacctcgctggtggtacagaatgtttcagtcatcctgtgtggaatcatcctgatgatggttttcttacataaacatgagcttctgaccatgtaccatggatgggttctcacttcctgctatatcctgatcatcactattgcaaatattgcaaatttggccagtactgctactgcaatcacaatccaaagggattggattgttgttgttgcaggagaagacagaagcaaactagcaaatatgaatgccacaatacgaaggattgaccagttaaccaacatcttagcccccatggctgttggccagattatgacatttggctccccagtcatcggctgtggctttatttcgggatggaacttggtatccatgtgcgtggagtacgtcctgctctggaaggtttaccagaaaaccccagctctagctgtgaaagctggtcttaaagaagaggaaactgaattgaaacagctgaatttacacaaagatactgagccaaaacccctggagggaactcatctaatgggtgtgaaagactctaacatccatgagcttgaacatgagcaagagcctacttgtgcctcccagatggctgagcccttccgtaccttccgagatggatgggtctcctactacaaccagcctgtgtttctggctggcatgggtcttgctttcctttatatgactgtcctgggctttgactgcatcaccacagggtacgcctacactcagggactgagtggttccatcctcagtattttgatgggagcatcagctataactggaataatgggaactgtagcttttacttggctacgtcgaaaatgtggtttggttcggacaggtctgatctcaggattggcacagctttcctgtttgatcttgtgtgtgatctctgtattcatgcctggaagccccctggacttgtccgtttctccttttgaagatatccgatcaaggttcattcaaggagagtcaattacacctaccaagatacctgaaattacaactgaaatatacatgtctaatgggtctaattctgctaatattgtcccggagacaagtcctgaatctgtgcccataatctctgtcagtctgctgtttgcaggcgtcattgctgctagaatcggtctttggtcctttgatttaactgtgacacagttgctgcaagaaaatgtaattgaatctgaaagaggcattataaatggtgtacagaactccatgaactatcttcttgatcttctgcatttcatcatggtcatcctggctccaaatcctgaagcttttggcttgctcgtattgatttcagtctcctttgtggcaatgggccacattatgtatttccgatttgcccaaaatactctgggaaacaagctctttgcttgcggtcctgatgcaaaagaagttaggaaggaaaatcaagcaaatacatctgttgtttgagacagtttaactgttgctatcctgttactagattatatagagcacatgtgcttattttgtactgcagaattccaataaatggctgggtgttttgctctgtttttaccacagctgtgccttgagaactaaaagctgtttaggaaacctaagtcagcagaaattaactgattaatttcccttatgttgaggcatggaaaaaaaattggaaaagaaaaactcagtttaaatacggagactataatgataacactgaattcccctatttctcatgagtagatacaatcttacgtaaaagagtggttagtcacgtgaattcagttatcatttgacagattcttatctgtactagaattcagatatgtcagttttctgcaaaactcactcttgttcaagactagctaatttatttttttgcatcttagttatttttaaaaacaaattcttcaagtatgaagactaaattttgataactaatattatccttattgatcctattgatcttaaggtatttacatgtatgtggaaaaacaaaacacttaactagaattctctaataaggtttatggtttagcttaaagagcacctttgtatttttattatcagatggggcaacatattgtatgaagcatatgtagcacttcacagcatggttatcatgtaagctgcaggtagaagcaaagctgtaaagtagatttatcacacaatgactgcatacagacttcaaatatgtcaatagtttggtcatagaacctagaagccaaaagccacacagaagggcaagaatcccaatttaactcatgttatcatcattagtgatctgtgttgtagaacatgagggtgtaagccttcagcctggcaagttacatgtagaaagcccacacttgtgaaggttttgttttacaaatcacttgatttaacacactcaggtagaatatttttatttttactgttttatacccagaagttatttctacattgttctacagcaagaatattcataaaagtatccctttcaaatgcctttgagaagaatagaagaaaaaaagtttgtatatattttaaaaaattgttttaaaagtcagtttgcaacatgtctgtaccaagatggtactttgccttaaccgtttatatgcactttcatggagactgcaatacgttgctatgagcactttctttatccttggagtttaatcctttgcttcatctttctacagtatgacataatgatttgctatgttgtaaaatctttgtaaaaaatttctatataaaaatattttgaaaatcttaaaaaaaaaaaaaaaaa

SEQ ID NO: 1451 - protein, 571 aa, Homo sapien
MTRAGDHNRQRGCCGSLADYLTSAKFLLYLGHSLSTWGDRMWHFAVSVFLVELYGNSLLLTAVYGLVVAGSVLVLGAIIGDWVDKNARLKVAQTSLVVQNVSVILCGIILMMVFLHKHELLTMYHGWVLTSCYILIITIANIANLASTATAITIQRDWIVVVAGEDRSKLANMNATIRRIDQLTNILAPMAVGQIMTFGSPVIGCGFISGWNLVSMCVEYVLLWKVYQKTPALAVKAGLKEEETELKQLNLHKDTEPKPLEGTHLMGVKDSNIHELEHEQEPTCASQMAEPFRTFRDGWVSYYNQPVFLAGMGLAFLYMTVLGFDCITTGYAYTQGLSGSILSILMGASAITGIMGTVAFTWLRRKCGLVRTGLISGLAQLSCLILCVISVFMPGSPLDLSVSPFEDIRSRFIQGESITPTKIPEITTEIYMSNGSNSANIVPETSPESVPIISVSLLFAGVIAARIGLWSFDLTVTQLLQENVIESERGIINGVQNSMNYLLDLLHFIMVILAPNPEAFGLLVLISVSFVAMGHIMYFRFAQNTLGNKLFACGPDAKEVRKENQANTSVV

SEQ ID NO: 1452 - DNA, 1701 bp, Mus musculus
ggaacaaaagctggagctccaccgcggtggcggccgctctagaactagtggatcccccgggctgcaggaattcggcacgagcagaagagggggctagctagctgtctctgcggaccaggggagaccccgcgcccccccggtgtgaggcggcctcacagggccgggtgggctggcgagccgacgcggcggcggaggaggctgtgaggagtgtgtggaacaggacccgggacagaggaaccatggctccgcagaacctgagcaccttttgcctgttgctgctatacctcatcggggcggtgattgccggacgagatttctataagatcttgggggtgcctcgaagtgcctctataaaggatattaaaaaggcctataggaaactagccctgcagcttcatcccgaccggaaccctgatgatccacaagcccaggagaaattccaggatctgggtgctgcttatgaggttctgtcagatagtgagaaacggaaacagtacgatacttatggtgaagaaggattaaaagatggtcatcagagctcccatggagacattttttcacacttctttggggattttggtttcatgtttggaggaacccctcgtcagcaagacagaaatattccaagaggaagtgatattattgtagatctagaagtcactttggaagaagtatatgcaggaaattttgtggaagtagttagaaacaaacctgtggcaaggcaggctcctggcaaacggaagtgcaattgtcggcaagagatgcggaccacccagctgggccctgggcgcttccaaatgacccaggaggtggtctgcgacgaatgccctaatgtcaaactagtgaatgaagaacgaacgctggaagtagaaatagagcctggggtgagagacggcatggagtacccctttattggagaaggtgagcctcacgtggatggggagcctggagatttacggttccgaatcaaagttgtcaagcacccaatatttgaaaggagaggagatgatttgtacacaaatgtgacaatctcattagttgagtcactggttggctttgagatggatattactcacttggatggtcacaaggtacatatttcccgggataagatcaccaggccaggagcgaagctatggaagaaaggggaagggctccccaactttgacaacaacaatatcaagggctctttgataatcacttttgatgtggattttccaaaagaacagttaacagaggaagcgagagaaggtatcaaacagctactgaaacaagggtcagtgcagaaggtatacaatggactgcaaggatattgagagtgaataaaattggactttgtttaaaataagtgaataagcgatatttattatctgcaaggtttttttgtgtgtgtttttgtttttattttcaatatgcaagttaggcttaatttttttatctaatgatcatcatgaaatgaataagagggcttaagaatttgtccatttgcattcggaaaagaatgaccagcaaaaggtttactaatacgtctccctttggggatttaatgtctggtgctgccgcctgagtttcaagaattaaagctgcaagaggactccaggagcaaaagaaacacaatatagagggttggagttgttagcaatttcattcaaaatgccaactggagaagtctgtttttaaatacattttgttgttattttt

SEQ ID NO: 1453 - protein, 358 aa, Mus musculus
MAPQNLSTFCLLLLYLIGAVIAGRDFYKILGVPRSASIKDIKKAYRKLALQLHPDRNPDDPQAQEKFQDLGAAYEVLSDSEKRKQYDTYGEEGLKDGHQSSHGDIFSHFFGDFGFMFGGTPRQQDRNIPRGSDIIVDLEVTLEEVYAGNFVEVVRNKPVARQAPGKRKCNCRQEMRTTQLGPGRFQMTQEVVCDECPNVKLVNEERTLEVEIEPGVRDGMEYPFIGEGEPHVDGEPGDLRFRIKVVKHPIFERRGDDLYTNVTISLVESLVGFEMDITHLDGHKVHISRDKITRPGAKLWKKGEGLPNFDNNNIKGSLIITFDVDFPKEQLTEEAREGIKQLLKQGSVQKVYNGLQGY

SEQ ID NO: 1454 - DNA, 5296 bp, Homo sapien
gcgcgagttgctgctaacgctcctcctccagcttcccacccccgccgcccgccgcggcccggtaccaacgggtggtctcgccgagggagctgtcgtgcctcgtggtcccgggactgcagtggtgtgcgctctcggcgcgtggcgctaggcatggcgatggatcaagtaaacgcgctgtgcgagcagctggtgaaagcggtgacggtcatgatggaccccaactccacccagcgctaccggctggaagccctcaagttttgtgaggagtttaaagaaaagtgtcctatctgtgtcccctgtggcttgaggttggctgagaaaacacaagttgccatcgtcagacattttggccttcagatcctggaacacgttgtcaagtttcggtggaacggcatgtctcgattggagaaggtgtatctgaagaacagtgtcatggagctgattgcaaatggaacattgaacattttggaagaggagaaccatattaaagatgctctgtctcgaattgtagtggaaatgatcaagcgagagtggccacagcattggcctgacatgctaatagaattggacactctttccaaacaaggggaaacacagacagaattggtgatgtttatccttttgcgactggcagaggatgtagtgacttttcagacacttccccctcaaagaagaagggacatccagcaaacattaacccagaacatggaaaggatcttcagttttctgcttaacacacttcaagaaaatgtaaacaagtatcagcaagtgaagacagatacttctcaggagtcaaaggcgcaagcaaactgtcgagtaggagttgcagcactgaatactctagcaggctatattgactgggtgtctatgagtcacatcactgctgaaaactgtaaactcctggagatactgtgtttgctgttgaatgaacaggaacttcagttgggagccgctgagtgtcttctcattgcagtcagcagaaaaggcaagttggaagaccggaagcccttgatggtcttatttggagatgttgccatgcattatatactctccgccgcacagactgctgatggaggaggtttggtagaaaaacactacgtctttctgaagaggctctgtcaggtgttgtgtgcgctgggcaatcagctgtgtgcattgctgggtgcagattctgatgtagaaacaccatcaaactttggaaaatacctggaatcttttcttgctttcacaacccatccaagtcagtttctacgctcttcaactcagatgacttggggagccctcttcaggcatgaaatcctgtcccgtgatcctttgctattagcaataataccaaaatatcttcgtgcttccatgactaacttggtcaagatgggctttccttctaaaacagacagccctagctgtgaatattctcggtttgattttgatagcgatgaggacttcaatgctttcttcaactcctcccgagcacaacaaggagaggtgatgaggttggcatgtcgtttggatcccaaaactagcttccagatggctggggagtggctaaagtatcaactatcaacttttcttgatgctggttctgtgaattcttgttctgcagttggaactggagaaggaagcctctgttccgtcttctcaccttcattcgtgcagtgggaagccatgactctttttttggaaagtgttatcacccagatgtttcgaacactaaatagagaagaaattcctgttaatgatggaatagagctattgcagatggttctgaactttgataccaaggatcccctcatcctgtcctgcgtccttactaatgtctctgcactctttccatttgtcacctacagaccagagttcctgccccaggtcttctctaagctattttcatctgtcacttttgaaactgttgaagaaagtaaggcccccagaacccgggcagtgaggaatgtgaggaggcatgcttgttcctccatcatcaagatgtgtcgtgactacccccagcttgtgctgcccaattttgacatgctttataaccatgtgaagcaactcctctccaatgagctactcctgacacaaatggagaagtgtgccctcatggaagccctggttctcattagcaaccaatttaagaactacgagcgtcagaaggtgttcctagaggagctgatggcaccagtggccagcatctggctttctcaagacatgcacagagtgctgtcagatgttgatgctttcattgtgtatgtgggtacagatcagaagagctgtgacccaggcctggaggatccgtgtggcttaaaccgtgcacgaatgagcttttgtgtatacagcattctgggtgtggtgaaacgaacttgctggcccactgacctagaagaggccaaagctgggggatttgtggtgggttatacatccagtggaaatccaatcttccgtaacccctgcacagagcagattctgaaacttcttgacaatttgcttgcgcttataagaacccacaatacattatatgcaccagaaatgctagccaaaatggcagagcctttcaccaaggctctggatatgcttgacgcggaaaaatctgctatattaggattacctcaacctctcttggaactcaatgactctcctgtcttcaaaaccgtcttggaaagaatgcagcgtttcttctctaccctctatgaaaactgttttcatatcctagggaaggcaggcccttccatgcagcaagacttctatactgtggaggaccttgctacccagcttctcagctcagcctttgtcaacttgaacaatattcctgactaccgactcagacccatgcttcgtgtctttgtaaagcctctggtgctcttctgtcccccagagcactatgaagccctggtatcccccatcctcggacctcttttcacctacctccatatgaggctttctcagaaatggcaagttatcaaccaaaggagcctgctgtgtggagaagatgaggctgcagatgaaaacccagagtctcaagagatgctggaggagcaactggtgaggatgttaacccgagaagtcatggacctaatcacggtttgctgtgtttcaaagaagggtgctgaccacagtagtgctcccccagcagatggagacgatgaagaaatgatggccacagaggtcaccccctcagctatggcagagcttacagacctgggcaaatgtctgatgaagcatgaggatgtttgtacagcgctattaattacagccttcaattccctggcctggaaagatactctgtcctgccagaggacaacctcacagctctgctggcctctcctcaaacaagtgctgtcagggacactgctcgcagatgcagttacgtggcttttcaccagtgtgctgaaaggcttacagatgcacgggcagcacgacgggtgcatggcttccctggtccatctggccttccagatatacgaggcactgcgccccaggtacctggagataagagctgtaatggagcaaatccctgaaatacagaaggactcactggaccagtttgactgcaagcttttaaacccctccctgcagaaagtggctgacaagcgccgaaaggaccaattcaaacgcctcattgctggttgcattgggaaacccttgggagagcagttccgaaaagaagttcacattaagaatcttccctcacttttcaaaaaaacaaagccaatgctggagacggaggtgctggacaatgatgggggtggcctggccaccatctttgaaccctgaatcaagcttttgggcatccttcctcggcctttcttgtcatctcttctttccctttgtagccgatctctaggcccttcttgcactgccacctcactttccaccactgtcagcctggaaagagatccaggtctggagctggagagaacaggccctgtgcaggaccagaagtaattatactaaagtatcaagaaagggagttagggcttaaactattctgtctagatgtcccagatagttcccattctacttggagatttggcttttccaagaaaagctagagcagagcagcccttctcccacaagccctcccacccccgtgcagccacatacctgtacagaatggtaactaagggtgctgtgcccaaccctgcgactagcaaggctcgcagcaagagcacagccctcaactacttgtgccagagtttctcttggaccactccaactcccactgagcccttttgctgctgggctggcaggaaactttccccactccctaaggggcatgtctgggttaggtgctaagtgctgaagagaacttggtcagttctctcaactttgctttgggcaagaatctggtcacctgatgggatccatggtacaggctactgctaaacttggcacagtatcaagtatagtacctccaaggaccagggctgggaagtctttagtgctaacatcccctttagagttcacacatcttgcccttccatgaatgacccctcagtctggcctccccagcctcaaggtccactcaggcacaagagccacagtaccctagatagtgtcacatgacaccgttgtcatccaaggataatacagaccaactaggctacatctgtgatgagcagctagcaaagccgctggtcttctcctaggactaagtccaggtgccttccacaatctcatggtctttcaggtccctggttacttttctcaaaggccatttccaaaagaatacatgccttcacatcacaacctgtactgtgagtccattctagaggtcactgaaaggccctgtaaagagaggacatggatacgggacctggccctgaggttattactggccgtaaggcagagttaatccatacagaaaccagtgtgtccatgtgctctgcacaaaaacagacctgttgtccatccagtccactgacaagagggtttccccgagagccgaagtggactgaagctacagtttttagctggtgcgggccacaggcagggtcagattgagaagaagcaaagctggggaagcagaagttgggagtcttgtgttgctccctcttcctgtgtggtgctctgggtttctgtggatcgtgaaggcgatctcaagagtgtttccctccaaacctgatagctgcctattcctgtctggttggggctgtggaggatgtagttgtatttattgcattgtaatatttttaacatcctgtgacttcatgctagaaattttctattgtttatagaaactttttgtagaaacattaactctaaagcacatctgcatgtcagtaaaaatctcagtttcgtacag

SEQ ID NO: 1455 - protein, 1096 aa, Homo sapien
ENHIKDALSRIVVEMIKREWPQHWPDMLIELDTLSKQGETQTELVMFILLRLAEDVVTFQTLPPQRRRDIQQTLTQNMERIFSFLLNTLQENVNKYQQVKTDTSQESKAQANCRVGVAALNTLAGYIDWVSMSHITAENCKLLEILCLLLNEQELQLGAAECLLIAVSRKGKLEDRKPLMVLFGDVAMHYILSAAQTADGGGLVEKHYVFLKRLCQVLCALGNQLCALLGADSDVETPSNFGKYLESFLAFTTHPSQFLRSSTQMTWGALFRHEILSRDPLLLAIIPKYLRASMTNLVKMGFPSKTDSPSCEYSRFDFDSDEDFNAFFNSSRAQQGEVMRLACRLDPKTSFQMAGEWLKYQLSTFLDAGSVNSCSAVGTGEGSLCSVFSPSFVQWEAMTLFLESVITQMFRTLNREEIPVNDGIELLQMVLNFDTKDPLILSCVLTNVSALFPFVTYRPEFLPQVFSKLFSSVTFETVEESKAPRTRAVRNVRRHACSSIIKMCRDYPQLVLPNFDMLYNHVKQLLSNELLLTQMEKCALMEALVLISNQFKNYERQKVFLEELMAPVASIWLSQDMHRVLSDVDAFIAYVGTDQKSCDPGLEDPCGLNRARMSFCVYSILGVVKRTCWPTDLEEAKAGGFVVGYTSSGNPIFRNPCTEQILKLLDNLLALIRTHNTLYAPEMLAKMAEPFTKALDMLDAEKSAILGLPQPLLELNDSPVFKTVLERMQRFFSTLYENCFHILGKAGPSMQQDFYTVEDLATQLLSSAFVNLNNIPDYRLRPMLRVFVKPLVLFCPPEHYEALVSPILGPLFTYLHMRLSQKWQVINQRSLLCGEDEAADENPESQEMLEEQLVRMLTREVMDLITVCCVSKKGADHSSAPPADGDDEEMMATEVTPSAMAELTDLGKCLMKHEDVCTALLITAFNSLAWKDTLSCQRTTSQLCWPLLKQVLSGTLLADAVTWLFTSVLKGLQMHGQHDGCMASLVHLAFQIYEALRPRYLEIRAVMEQIPEIQKDSLDQFDCKLLNPSLQKVADKRRKDQFKRLIAGCIGKPLGEQFRKEVHIKNLPSLFKKTKPMLETEVLDNDGGGLATIFEP

SEQ ID NO: 1456 - DNA, 1583 bp, Homo sapien
gcacgaggccgtggaggcgccacgtcccttgcggcggcgggagagaaatcgcttggacttcggggcggcctcggacggccatggcctttaccctgtactcactgctgcaggcagccctgctctgcgtcaacgccatcgcagtgctgcacgaggagcgattcctcaagaacattggctggggaacagaccagggaattggtggatttggagaagagccgggaattaaatcacagctaatgaaccttattcgatctgtaagaaccgtgatgagagtgccattgataatagtaaactcaattgcaattgtgttacttttattatttggatgaatatcagtggagaaaatggagactcagaagaggacatgccagtagaagttattactttggtcattattggaatatttatatcttagcttggctgaccttgcacttgtcaaaaatgtaaagctgaaaataaaaccagggtttctatttatctgtttttttttttaatgttgcacttgtagtttcattacaaaagatcagatcatgaaaggcagtaactctccaggactggaatatctgattgctcagtgttaatagtagttcatgctgtggtgagattgttaaaagggtgcaagactgttgcttctctttttttagatatttttctatctctcacttctcagggatgaaattctttttcaaagttttgaagttccttgcaacttagccatgatgtgagtggttatccctagataaaattaaaaggatttttaaaaagtaattactgcacataaaatgataaataggtaatttgaataattttattttaagctccttggttaattattttgtctattgtctcagctataaattcaaatttatacatactattgagtattaatattctctgatttcagggagaattctgtcagtcacatgatgattatgtttttgtttaacaattctttccatgcacttgttattttattaatttgcctgaatgatgagaccagaccagtgtctacagattttcattgtcagaaaaatctataagtctgccctttttacaatgatgatttaaaaaaaacaacagcgtaaatattagcccacaagagcagtcctaaacaatcacaattacactgtactacccaagaagactgtttattgtgaagcatttacctttcaaaaaatcattacatttctatttcttggtggagcagcacattgtggagtgtgattcttaattcttcattgagtttgtcaataggacattgatgctggataggttgtcttttgtttttatgtctcagaccatcttgtgagattgtttgcctatctcataatacagttttatgcagaaaggttgaaactatgtaaatggtttttatggaaattatcagttacaatattttaaaggtgtagaatggcatctttgtttataggagaacatttgtaaataaagttaaatttctaagcctttaaaatattgtaactgataatttccataaaaaccatttacatagtttcaacctttctgcataaaactgtattatgagataggcaaacaatctcacaagatggtctgagacataaaaa

SEQ ID NO: 1457 - protein, 82 aa, Homo sapien
MAFTLYSLLQAALLCVNAIAVLHEERFLKNIGWGTDQGIGGFGEEPGIKSQLMNLIRSVRTVMRVPLIIVNSIAIVLLLLFG

SEQ ID NO: 1458 - DNA, 2483 bp, Homo sapien
gtctgtaatccgtgtctccagtagtagctgcagtgactgtaggtatcggtgttcctattatgttagcttatgtctatggcgtagttccaatttctctttgtcgaagcggaggttgtggagtctcagcaggcaatggaaaaggagttaggattgaatttgatgatgaaaatgatataaatgttggtggaactaacacagctgtagacacaacatcagtagcagaagcaagacacaacccaagcataggggagggaagtgttggtgggctgactggcagtttgagtgcaagtggaagccacatggatcgaataggagccatccgagacaacctgagtgaaacggccagcaccatggcactagctggagccagtataacggggagtctgtcaggaagtgccatggtaaactgttttaacaggttggaagtacaagcagatgtacagaaagaacggtacagtctaagtggagaatctggcacagtcagcttgggaacagttagtgataatgccagcaccaaagcaatggcaggatccattctgaattcctacatcccattggacaaagaaggcaacagtatggaggtgcaagtagatattgagtcaaagccatccaaattcaggcacaacagtggaagcagtagtgtggatgatggcagtgccacccgaagtcatgctggcggttcatccagtggcttgcctgaaggtaaatctagtgccaccaagtggtccaaagaagcaacagcagggaaaaaatcaaaaagtggtaaactgaggaaaaagggtaacatgaagataaatgagacgagagaggacatggatgcacagttgttagaacaacaaagcacgaactcaagtgaatttgaggctccatccctcagtgacagtatgccttctgtagcagattctcactctagtcatttttctgaatttagttgttctgacctagaaagcatgaaaacttcttgtagtcatggttccagtgattatcacacccgctttgctactgttaacattcttcctgaggtagaaaatgaccgtctggaaaattccccacatcagtgtagcatttctgtggttacccaaactgcttcctgttcagaagtttcacagttgaatcatattgctgaagaacatggtaacaatggaataaaacctaatgttgatttatattttggcgatgcactaaaagaaacaaataacaaccactcacatcagacaatggaattaaaagttgcaattcagactgaaatttaggcccataaatgctgcagaataattaccactgtacaaccgtgtttggagctggttgaactacatgtgactacttaagtttcaggttaccagcaaaagccgggtttcattatcataatgcagatacattttctgtgttcagcaaggcattgtgtgtcatgtggatcttagttaccaaactatgaagtgaaggctttaaaagtgcattattttaaggataataaatttgaagagcaaagcatgttttgtgtgtttgccacaaaacattgcttgaagcacatacttagatagaaattggtcttaatttatataatcaatataaaatactaatgcaattctacagcattcaaatgaagaaaacttgaggctttagggataagtggttagtgatattttattgaaaccactaaagagataagtttaaaagaactgcataggttactctcagtatatgatactctgtaacatttctatttatatcggcataaatttcattttttttcttcatatgcaatgtggttatataaagcttaatgcagctcatttgctaccatttggatacttagacactttgagcaagattgtggcagtttttgcacaactttgaaatagaaatacctggtactctatcttgtttattgttgatgccatcttagaggaaaaaatgtaaaggtaagtaattaagcatatgacagcaacaaataagatacataaaactacaaaataaagtcccattaggttataagtattacaaaaaatccacctttctctaaggggaagtttgtaccccattgattcttggtgcctttgggatcgactgggttttaatggcctagttatttgaggattttgctgtgttgttttccatgtcttctctggtcaccttggattatatataaaaatacaggaaataggtaaacatgaatgtgattaataatgctgaaaaagtattagcctaccaaagacacactcaggctttagtgaataactttacataacctcagtttttaacacatgcatatcttctccaaccatgaaatcaaagcacggtgcagaacttgtaccaagtacaaaaggtccatgtatgattagcattattttcttttgcttttgtttatggacaatgttcagctgacataagcagaagttggccaaaatactgcctgtactgttaatttcctgtataattcacttaaataaaagcaggttaacctcaaaaaaaaaaaaaaaaaa

SEQ ID NO: 1459 - protein, 397 aa, Homo sapien
MLAYVYGVVPISLCRSGGCGVSAGNGKGVRIEFDDENDINVGGTNTAVDTTSVAEARHNPSIGEGSVGGLTGSLSASGSHMDRIGAIRDNLSETASTMALAGASITGSLSGSAMVNCFNRLEVQADVQKERYSLSGESGTVSLGTVSDNASTKAMAGSILNSYIPLDKEGNSMEVQVDIESKPSKFRHNSGSSSVDDGSATRSHAGGSSSGLPEGKSSATKWSKEATAGKKSKSGKLRKKGNMKINETREDMDAQLLEQQSTNSSEFEAPSLSDSMPSVADSHSSHFSEFSCSDLESMKTSCSHGSSDYHTRFATVNILPEVENDRLENSPHQCSISVVTQTASCSEVSQLNHIAEEHGNNGIKPNVDLYFGDALKETNNNHSHQTMELKVAIQTEI

SEQ ID NO: 1460 - DNA, 1402 bp, Homo sapien
ggcacgagcggcacgagcggagggcgcctcgcggcaggagcgggatttccggggtcacgggaaccggcaggggaacgggataaagttcccggagaaaggaaaggagagcgtgggatagtaaaagagaagacgcggagaagaggagaggacctacaagaacggaggacaggggcgcacgatggtcccggggggagcggaaacaaaggcacgcaaaacggaaaagcgtgtgtaggggagcggaaaaggaagtcaccaccgtggcctgcgacgaaatggcgaaaagtcttttgaagacagcctctctgtctggaaggacaaaattgctacatcaaacaggattgtcactttatagtacatcccatggattttatgaggaagaagtgaaaaaaacacttcagcagtttcctggtggatccattgaccttcagaaggaagacaatggcattggcattcttactctgaacaatccaagtagaatgaatgccttttcaggtgttatgatgctacaacttctggaaaaagtaattgaattggaaaattggacagaggggaaaggcctcattgtccgtggggcaaaaaatactttctcttcaggatctgatctgaatgctgtgaaaatcaccataggaatctcccagaggagacttcctttaataagtgttgcgctggttcaaggttgggcattgggtggaggagcagaatttactacagcatgtgatttcaggttaatgactccagagagtaagatcagattcgtccacaaagagatgggcataataccaagctggggtggcaccacccggctagttgaaataatcggaagtagacaagctctcaaagtgttgagtggggcccttaaactggattcaaaaaatgctctaaacataggaatggttgaagaggtcttgcagtcttcagatgaaactaaatctctagaagaggcacaagaatggctaaagcaattcatccaagggccaccggaagtaattagagctttgaaaaaatctgtttgttcaggcagagagctatatttggaggaagcattacagaacgaaagagatcttttaggaacagtttggggtgggcctgcaaatttagaggctattgctaagaaaggaaaatttaataaataattggtttttcgtgtggatgtactccaagtaaagctccagtgactaatatgtataaatgttaaatgatattaaatatgaacatcagttaaaaaaaaaattctttaaggctactattaatatgcagacttacttttaatcatttgaaatctgaactcatttacctcatttcttgccaattactcccttgggtatttactgcgtaattggaacatttactaaaataacacttttggcttaaaaaaaaaaaaaaaaaaaaaaaaaaaaaaaaa

SEQ ID NO: 1461 - protein, 286 aa, Homo sapien
MAKSLLKTASLSGRTKLLHQTGLSLYSTSHGFYEEEVKKTLQQFPGGSIDLQKEDNGIGILTLNNPSRMNAFSGVMMLQLLEKVIELENWTEGKGLIVRGAKNTFSSGSDLNAVKITIGISQRRLPLISVALVQGWALGGGAEFTTACDFRLMTPESKIRFVHKEMGIIPSWGGTTRLVEIIGSRQALKVLSGALKLDSKNALNIGMVEEVLQSSDETKSLEEAQEWLKQFIQGPPEVIRALKKSVCSGRELYLEEALQNERDLLGTVWGGPANLEAIAKKGKFNK

SEQ ID NO: 1462 - DNA, 1590 bp, Homo sapien
atgttggtgctgtttgaaacgtctgtgggttacgccatctttaaggttctaaatgagaagaaacttcaagaggttgatagtttatggaaagaatttgaaactccagagaaagcaaacaaaatagtaaagctaaaacattttgagaaatttcaggatacagcagaagcattagcagcattcacagctctgatggagggcaaaatcaataagcagctgaaaaaagttctgaagaaaatagtaaaagaagcccatgaaccgctggcagtagctgatgctaaactaggaggggtcataaaggaaaagctgaatctcagttgtatccatagtcctgttgttaatgaacttatgagaggaattcgttcacaaatggatggattaatccctggggtagaaccacgtgaaatggcagctatgtgtcttggattggctcacagcctgtctcgatatagattgaagtttagcgctgataaagtagacacaatgattgttcaggcaatttccttgttagatgacttggataaagaactaaacaactacattatgcgatgtagagaatggtatggctggcatttccctgaattaggaaaaattatttcagataatttaacatactgcaagtgtttacagaaagttggcgataggaagaactatgcctctgccaagctttctgagttgctgccagaagaagttgaagcagaagtgaaagcagctgcagagatatcaatgggaacagaggtttcagaagaagatatttgcaatattctgcatctttgcacccaggtgattgaaatctctgaatatcgaacccagctctatgaatatctacaaaatcgaatgatggccattgcacccaatgttacagtcatggttggggaattagttggagcacggcttattgctcatgcaggttctcttttaaatttggccaagcatgcagcttctaccgttcagattcttggagctgaaaaggcacttttcagagccctcaaatctagacgggatacccctaagtatggtctcatttatcatgcttcactcgtgggccagacaagtcccaaacacaaaggaaagatttctcgaatgctggcagccaaaaccgttttggctatccgttatgatgcttttggtgaggattcaagttctgcaatgggagttgagaacagagccaaattagaggccaggttgagaactttggaagacagagggataagaaaaataagtggaacaggaaaagcattagcaaaaacagaaaaatatgaacacaaaagtgaagtgaagacttacgatccttctggtgactccacacttccaacctgctctaaaaaacgcaaaatagaacaggtagataaagaggatgaaattactgaaaagaaagccaaaaaagccaagattaaagttaaagttgaagaagaggaagaagaaaaagtggcagaagaagaagaaacatctgtgaagaagaagaagaaaaggggtaaaaagaaacacattaaggaagaaccactttctgaggaagaaccatgtaccagcacagcaattgctagtccagagaaaaagaagaaaaagaaaaaaaagagagagaacgaggattaa

SEQ ID NO: 1463 - protein, 529 aa, Homo sapien
MLVLFETSVGYAIFKVLNEKKLQEVDSLWKEFETPEKANKIVKLKHFEKFQDTAEALAAFTALMEGKINKQLKKVLKKIVKEAHEPLAVADAKLGGVIKEKLNLSCIHSPVVNELMRGIRSQMDGLIPGVEPREMAAMCLGLAHSLSRYRLKFSADKVDTMIVQAISLLDDLDKELNNYIMRCREWYGWHFPELGKIISDNLTYCKCLQKVGDRKNYASAKLSELLPEEVEAEVKAAAEISMGTEVSEEDICNILHLCTQVIEISEYRTQLYEYLQNRMMAIAPNVTVMVGELVGARLIAHAGSLLNLAKHAASTVQILGAEKALFRALKSRRDTPKYGLIYHASLVGQTSPKHKGKISRMLAAKTVLAIRYDAFGEDSSSAMGVENRAKLEARLRTLEDRGIRKISGTGKALAKTEKYEHKSEVKTYDPSGDSTLPTCSKKRKIEQVDKEDEITEKKAKKAKIKVKVEEEEEEKVAEEEETSVKKKKKRGKKKHIKEEPLSEEEPCTSTAIASPEKKKKKKKKRENED

SEQ ID NO: 1464 - DNA, 2338 bp, Homo sapien
ggcacgaggctcagcgtttgagtcagccaggagtagcaataggtttggcttggactcccttaggtggagaaatcatgttcgtggaggcgagtcgaatggatggcgagggccagttaactctgaccggccagctcggggacgtgatgaaggagtccgcccacctcgctatcagctggctccgcagcaacgcaaagaagtaccagctgaccaatgcttttggaagttttgatcttcttgacaacacagacatccatctgcacttcccagctggagctgtcacaaaagatggaccatctgctggagttaccatagtaacctgtctcgcctcactttttagtgggcggctggtacgttcagatgtagccatgactggagaaattacactgagaggtcttgttcttccagtgggtggaattaaagacaaagtgctggcggcacacagagcgggactgaagcaagtcattattcctcggagaaatgaaaaagaccttgagggaatcccaggcaacgtacgacaggatttaagttttgtcacagcaagctgcctggatgaggttcttaatgcagcttttgatggtggctttactgtcaagaccagacctggtctgttaaatagcaaactgtaggtccaaatctcaattttttagaattttaagttatgaagtgctcaaaggtactgacacagttgattttattcacaccattaggggtatgcaagatgtccctgttttataaacataatcacaacagtaataaacctcaagtagtggctagtgtttagtatagaaatataagatgttgatttagtaaactgataaaaatcgaattcttgtctttttagtgggatccttactgtccctggaaagatatagcatagtggttctcagcacagtctccagaacagaagcatctgtagtacctggtaacttgttagaaatgtacattctcaggctccacagcaggccgcctgaatcaaatcctgggaggtggggacagaaatctgtgttttaagaagccttccaggtaattctgctgcacactcaagttcaggaaccaccggtatagaccattaccttagtggatttacctgtagagtttattggatcctgaaaccaatcaattacttagaactaggcaaagatgaaagtatagccaactattcttggctatatatatatattcaagtgggccgggcgtgatggctcacacctgtaattccagcactttgggaggtcgaggtaggcagatcaccgagcccaagagttcaagacaatcctggccaacggcgaaactctgtctctacaaaaaatatacaggcgtgttagcatgtgcctgtaatcccagcttcttgggaagctgaggcacaagaattgcctgaacccaggaggtggaggttgcagtgagctgggatcgcgccattgcactccagcctggctgacagagcgagactgtctctaaaaaaaaaagactcaagtggaccctacaatgaagcctacacatcccaatagaagccccttcttatgctgagggaagcagccctcagaacatgatagcttgtatccagcagagtggcacgtgctggcacacctcacagaagcaccctggccctggatgcctgcaacctcagaagagtgcagctcccagagggaggcagccatccatctgggatggtcctaagcatggaatcctaactcctgattccgtctcctatttcttgcttggctatgccagttcccaaatctggtagatgtccatgcccatgtgctcctgctgggactcaattcaggctatgtatgactatgaagtcaggctcatctgcttactggctgtgtgaactttttgtatcttggttttcttcatccatgaaatccaagtaatactacctaattgttactgtggagattaagttcaaatgcaatgtatagtaatattaagcaatttctagttattattctagccagtaatggacttcagaatcttttattacacaatataagaatatgtatgtaaagacattttggaatttcctggatgagaaggaagtctgggctgggcatggtggctcacgcctgtaaccctagcactttaggaaatcgaggcgagtggatcacttaagctcaggagttcaaggccagcctgggcaacatggcaaaaccccatttctacaaaaaatacaaaaattagctgggcatggtggcacccgcctgtagtccagctacttgaggctgagatgggaggatgagggaggtcggggctgcagtgagccaagatcacgccactgcactccagcaccctgggcgacagagtgagaccctgtctcaaaaaaaaaaaaaaaaaa

SEQ ID NO: 1465 - protein, 160 aa, Homo sapien [sequence omitted]

SEQ ID NO: 1466 - DNA, 1129 bp, Homo sapien
tggcaccggcatcggctgacactgctgcctccagctagttatttcgtcctcttccgttcttcacccctacaccttggaggtgaacttctcacctgagggctgtaaagactcgtttgaaaatggagagccaagaaccaacggaatcttctcagaatggcaaacagtatatcatttcagaggagttaatttcagaaggaaaatgggtcaagcttgaaaaaacaacgtacatggatcctactggtaaaactagaacttgggaatcagtgaacgtaccaaccaggaaagagcagactgcggatggtgtcgcggtcatccccgtgctgcagagaacacttcactatgagtgtatcgttctggtgaaacagttccgaccaccaatggggggctactgcatagagttccctgcaggtctcatagatgatggtgaaaccccagaagcagctgctctccgggagcttgaagaagaaactggctacaaaggggacattgccgaatgttctccagcggtctgtatggacccaggcttgtcaaactgtactatacacatcgtgacagtcaccattaacggagatgatgccgaaaacgcaaggccgaagccaaagccaggggatggagagtttgtggaagtcatttctttacccaagaatgacctgctgcagagacttgatgctctggtagctgaagaacatctcacagtggacgccagggtctattcctacgctctagcgctgaaacatgcaaatgcaaagccatttgaagtgcccttcttgaaattttaagcccaaatatgacactggccatttttgtaaacgagaccaccaggccttcttcactaagactttgtattcaacttagtttaatgtagatttgccattagctttttcgtaaaataaaagcacagaacagatgtggtggtggtatggaattgtaattacaggtaggttgtgaccttcctttaaatttgttataactccagctaaaattaacaaagaatataaatgcaagtatgtttactccaatttttttaaagctcaacagagttaactacagctcagttacttttctagtccagtctggaacacaggggtatttggtattgagaaatagacctgagttctcaattaggtca

SEQ ID NO: 1467 - protein, 219 aa, Homo sapien
MESQEPTESSQNGKQYIISEELISEGKWVKLEKTTYMDPTGKTRTWESVNVPTRKEQTADGVAVIPVLQRTLHYECIVLVKQFRPPMGGYCIEFPAGLIDDGETPEAAALRELEEETGYKGDIAECSPAVCMDPGLSNCTIHIVTVTINGDDAENARPKPKPGDGEFVEVISLPKNDLLQRLDALVAEEHLTVDARVYSYALALKHANAKPFEVPFLKF

SEQ ID NO: 1468 - DNA, 1041 bp, Homo sapien
gcccccgagcaggagccggtgcgagcggagcagagccgaggtcgggccgcgagcggagccggctgagcgggcgccgagctcccgccatggcccggaacacgctgtcctcgcgcttccgccgggtggacatcgacgaatttgacgagaacaaatttgtggacgagcaggaggaggcggcggcggcggcggcggagccaggcccggacccgagcgaggtggacgggctcctgcggcaaggggacatgcttcgggcattccatgcagccttgcggaactctcccgtcaacaccaagaatcaagctgtgaaggagcgagcccagggcgtggtgctgaaagtgctcacaaacttcaagagcagtgagattgagcaggctgtgcagtcactggacagaaacggcgttgacttgttaatgaagtacatttataaaggctttgagaagcccacagaaaatagcagcgcagtgttactccagtggcacgaaaaggccttagcagtaggaggactaggctccattataagagttcttacagcaagaaagactgtttaaaaaaaataaaaagactcatgttaccttgagaagaattctggatgcccaggctggtgaagaagggattgacaatggaccatcttcctaggaactcccaagtaaactatttcaggacatgtatctgctgaaatgtattttattttcaaggtggaggggaaaatcgtctgtttcctaaatcctgtttaggatctgatagtctatgcctttgtctccgagtactgcagaactgacattttgacggtctaccagcgtggcggctggtgttggtcagatgcacctgtgtgcactgggggagggatggtttgggcaggtgcagatccaagggctgtggtaaacgggagagcttgtgtttttgaagtggaaaaaaacccaagagtttgtacagacatcctgtcttcccagagaaggtggacactcttgggctcattgtaaagtgcctgctgcatcaataaagctcttggcttattagtctatacaaaaaaaaaaaaaaaaa

SEQ ID NO: 1469 - protein, 153 aa, Homo sapien
MARNTLSSRFRRVDIDEFDENKFVDEQEEAAAAAAEPGPDPSEVDGLLRQGDMLRAFHAALRNSPVNTKNQAVKERAQGVVLKVLTNFKSSEIEQAVQSLDRNGVDLLMKYIYKGFEKPTENSSAVLLQWHEKALAVGGLGSIIRVLTARKTV

SEQ ID NO: 1470 - DNA, 1187 bp, Homo sapien
acgatggcatgacaaccgacgttggagtttggaggtgcttgccttagagcaagggaaacagctctcattcaaaggaactagaagcctctccctcagtggtagggagacagccaggagcggttttctgggaactgtgggatgtgcccttgggggcccgagaaaacagaaggaagatgctccagaccagtaactacagcctggtgctctctctgcagttcctgctgctgtcctatgacctctttgtcaattccttctcagaactgctccaaaagactcctgtcatccagcttgtgctcttcatcatccaggatattgcagtcctcttcaacatcatcatcattttcctcatgttcttcaacaccttcgtcttccaggctggcctggtcaacctcctattccataagttcaaagggaccatcatcctgacagctgtgtactttgccctcagcatctcccttcatgtctgggtcatgaacttacgctggaaaaactccaacagcttcatatggacagatggacttcaaatgctgtttgtattccagagactagcagcagtgttgtactgctacttctataaacggacagccgtaagactaggcgatcctcacttctaccaggactctttgtggttgcgcaaggagttcatgcaagttcgaaggtgacctcttgtcacactgatggatacttttccttcctgatagaagccacatttgctgctttgcagggagagttggccctatgcatgggcaaacagctggactttccaaggaaggttcagactagctgtgttcagcattcaagaaggaagatcctccctcttgcacaattagagtgtccccatcggtctccagtgcggcatcccttccttgccttctacctctgttccaccccctttccttcctttcctctctgtaccattcattctccctgaccggcctttcttgccgagggttctgtggctcttacccttgtgaagcttttcctttagcctgggacagaaggacctcccagcccccaaaggatctcccagtgaccaaaggatgcgaagagtgatagttacgtgctcctgactgatcacaccgcagacatttagatttttatacccaaggcactttaaaaaaatgttttataaatagagaataaattgaattcttgttccaaaaaaaaaaaaaaaaaaaaaaaaaaaa

SEQ ID NO: 1471 - protein, 162 aa, Homo sapien
MLQTSNYSLVLSLQFLLLSYDLFVNSFSELLQKTPVIQLVLFIIQDIAVLFNIIIIFLMFFNTFVFQAGLVNLLFHKFKGTIILTAVYFALSISLHVWVMNLRWKNSNSFIWTDGLQMLFVFQRLAAVLYCYFYKRTAVRLGDPHFYQDSLWLRKEFMQVRR

SEQ ID NO: 1472 - DNA, 1286 bp, Homo sapien
ggcacgaggctgccgcgctgtccgcgttatctcctcccggtgagaacgaaccgcagtgtccaccggcgaggagccagccctgtcccggtcagagaaagacgacgaggatacctgggagcgggcggcggccgggctgggccgcgccggtgcgggctggcgactctgctcctccgcttgctgctgtctctgggaactgggtgccagcgctgaggggcttccagcggacagggacccccttccccggctcccctgcccaccctgccggggagggcggaagatgccggtgaagaagaagagaaaatcccctggggtggcagcagcagtagcggaagacggaggcctcaaaaagtgtaaaatctccagctattgcagatcccaaccccctgctagactaataagtggagaggaacatttttcaagcaagaagtgcctggcttggttttatgaatatgcaggtcctgatgaagttgtagggccagaaggaatggaaaaattttgtgaagacattggtgttgaacctgaaaatattattatgttagttttagcgtggaaattggaggctgaaagcatgggattttttaccaaggaagaatggttaaagggaatgacttcattacagtgtgactgcacagaaaagttacaaaacaaatttgactttttgcgctcacagttgaatgatatttcgtcatttaagaatatctacagatatgcctttgattttgcaagggataaagatcagagaagccttgatattgatactgctaaatctatgttagctcttctgcttgggaggacatggccactgttttcagtattttaccagtacctggagcaatcaaagtatcgtgttatgaacaaagatcaatggtacaatgtattagaattcagcagaacagtccatgctgatcttagtaactatgatgaagatggtgcttggcctgttcttcttgatgaatttgttgagtggcaaaaagtccgtcagacatcatagcaagaactatgtgaagaaaatgcaaacctttcaattcccacgtgtatacaagctaatgtgatgagggggaaaaaaatccaacgggtgcattttcattcatatgaaagacttctcatagtacttttttttcctttttttaaaggaggtttttcttgttacatgtgatgggcattgagccacacctcttcttagactgaatattgaagtttttgttttgagttatgtttataacatttatttcagaacaataaagattcagatttgtgaaaaaaaaaaaaaaaaaaaaaaaaaaaaa

SEQ ID NO: 1473 - protein, 237 aa, Homo sapien
MPVKKKRKSPGVAAAVAEDGGLKKCKISSYCRSQPPARLISGEEHFSSKKCLAWFYEYAGPDEVVGPEGMEKFCEDIGVEPENIIMLVLAWKLEAESMGFFTKEEWLKGMTSLQCDCTEKLQNKFDFLRSQLNDISSFKNIYRYAFDFARDKDQRSLDIDTAKSMLALLLGRTWPLFSVFYQYLEQSKYRVMNKDQWYNVLEFSRTVHADLSNYDEDGAWPVLLDEFVEWQKVRQTS

SEQ ID NO: 1474 - DNA, 1284 bp, Homo sapien
taactccttccctctttgcggattctagaacggaacctttttttaattcttcccagtagaaacgtaggaacaatttcgtgaacgcaatccggagtgcccaacatggcggcggccgtaaggtgcatgggtagagccttgatacatcatcaaaggcatagcctttccaagatggtttatcagacatcactttgttcttgttctgtaaacatccgagtgcccaacagacattttgctgctgctacaaagtctgcaaagaaaacaaaaaaaggtgctaaagaaaaaacaccagatgagaaaaaagatgaaatagaaaaaataaaagcatatccctatatggaaggcgaacctgaggatgatgtctatttaaaacgcttatacccgagacagatatatgaggtggagaaagctgttcacttacttaagaaatttcaaattcttgactttactagtccaaagcaaagtgtttatcttgatttgacactggatatggcactgggaaagaagaaaaacgtggagccatttaccagtgttcttagtttgccatacccatttgcttccgaaatcaataaagttgctgtatttacagagaatgcatcagaggtcaaaatagcggaagaaaatggagctgcatttgcaggaggcactagtctgatacagaagatttgggatgatgaaattgttgcagacttttacgtagctgttccagaaataatgcctgaacttaatcgattaaggaagaaactgaataaaaaatatccaaagctttctcgaaattccattggccgtgacatccccaaaatgcttgaattatttaaaaatggacatgaaattaaggtagatgaagaaagggagaactttctccagaccaaaatagcaacattggatatgtcaagtgaccagatagctgccaatctgcaagcagttattaatgaagtttgtaggcacagaccgctgaatttgggtccctttgtggtacgtgctttccttcgtagttcaacaagtgaaggtttattactgaagattgatccattgttgcctaaagaagtaaaaaatgaagaaagtgaaaaagaagatgcctaaatgtggtgaattgtgaaattactttcagtggtttaagaagcaatggagaaaatgataatacagcataatttttacatttgatgtcttgttattgatcatacttgaaagtgaactttaacattgaaaaatcgtacagtcatttcaagaataagaaaataaaattttctctttgtctgaaaaaaaaaaaaaaaaaaaaaaaaaaaa

SEQ ID NO: 1475 - protein, 303 aa, Homo sapien
MVYQTSLCSCSVNIRVPNRHFAAATKSAKKTKKGAKEKTPDEKKDEIEKIKAYPYMEGEPEDDVYLKRLYPRQIYEVEKAVHLLKKFQILDFTSPKQSVYLDLTLDMALGKKKNVEPFTSVLSLPYPFASEINKVAVFTENASEVKIAEENGAAFAGGTSLIQKIWDDEIVADFYVAVPEIMPELNRLRKKLNKKYPKLSRNSIGRDIPKMLELFKNGHEIKVDEERENFLQTKIATLDMSSDQIAANLQAVINEVCRHRPLNLGPFVVRAFLRSSTSEGLLLKIDPLLPKEVKNEESEKEDA

SEQ ID NO: 1476 - DNA, 903 bp, Homo sapien
tagtcacgctcggtaccaggcgcagatcatggcaggcagccggctggaaaccgtagggagcatcttctctcggactcgggacctggttcgggccggggtgctgaaggagaagcccctgtggtttgacgtatatgacgcctttcccccgctgagggagcccgtcttccaaaggcctcgagtgcgatatggcaaagccaaagctcccatccaagacatctggtaccacgaggatcggattagagcgaagttttattcagtgtatgggtctggtcaaagagcttttgatctattcaatccaaacttcaagtctacctgtcaacggtttgtggagaagtacactgagctacagaaacttggagaaacagatgaagagaagttatttgtggaaacagggaaggctttattggcagaaggtgtcattttaagacgagtaggcgaagcaaggactcaacacggaggtagtcacgtttcccggaaatccgaacacttgagtgtcagaccacagactgcgttggaagaaaacgagactcagaaagaagttccacaggaccagcatttggaggcacctgcagaccagtcgaaaggtctcttgcctccctgaaggacctgtatactgtgtatgctggcattcacactctactcactggctgaatgttgagctatttttaaacagttgaactgtgtaaatgtttcttgatctctaaggtattatgtttgccttctcttagttatttctgggttgtcacaaagctcagtatcatggtttgacagaagcagttatgtgaacttttatgttaggacattactaaataaagaattccctagctgcttataaagtaaatttactttgaattgtaaataacatgaagaaacctttataaagattgttcaaatgggactcaa

SEQ ID NO: 1477 - protein, 190 aa, Homo sapien
MAGSRLETVGSIFSRTRDLVRAGVLKEKPLWFDVYDAFPPLREPVFQRPRVRYGKAKAPIQDIWYHEDRIRAKFYSVYGSGQRAFDLFNPNFKSTCQRFVEKYTELQKLGETDEEKLFVETGKALLAEGVILRRVGEARTQHGGSHVSRKSEHLSVRPQTALEENETQKEVPQDQHLEAPADQSKGLLPP

SEQ ID NO: 1478 - DNA, 937 bp, Homo sapien
acggcgcccgccaggagcgccccccactcccaggccagcccaccccggcggaccgggccccgcgcgcccaggcgaggcactgggctccctctgctccccgtgggccgctccccgcgtggggccactgcccccggcccccgccatggtgcggatttcaaagcccaagacgtttcaggcctacttggatgattgtcaccggaggtatagctgtgcccactgccgcgctcacctggccaaccacgacgacctcatctccaagtccttccagggcagtcaggggcgtgcctacctcttcaactcagtggtgaacgtgggctgcgggccagccgaggagcgggtgctgctgaccggcctccatgctgtcgccgacatccactgcgagaactgcaagaccactttgggctggaaatatgaacaggcctttgagagcagccagaagtacaaagaggggaagtacatcattgaactcaaccacatgatcaaagacaacggctgggactgacccccgctcccccgacgcatgtggctccagcccggcctggccgccagggagcgccactggcttcccgccacccgaagggagctctggaccctcagagcccctgcagaggacggatctagctcctgtatatatattttattgcatgcactgtgaccttggggggagaacagaagggggacgacgcccccgcacctcctgcgatctggctggcttggatctcgtttttaacccgttcctgccccacctgccctatagttatggcctgtgttctgctctcctggtcccagtgcaccgtctgctctgtgaactcctcccaccaggcccttcttaccccacgcgtgtctgtccccctcgttctgtagcgtttgtacataataaaacaatggagtggagacaaaaaaaaaaaaaaaaaaaaaaaaaaaaaaaaaaaaaaaa

SEQ ID NO: 1479 - protein, 119 aa, Homo sapien
MVRISKPKTFQAYLDDCHRRYSCAHCRAHLANHDDLISKSFQGSQGRAYLFNSVVNVGCGPAEERVLLTGLHAVADIHCENCKTTLGWKYEQAFESSQKYKEGKYIIELNHMIKDNGWD

SEQ ID NO: 1480 - DNA, 1215 bp, Homo sapien
gtgacattgagctcaccagcgccaccgtccccggcgaagttctgcgctggtcggcggagagcaagtggccatggggagcctcagcggtctgcgcctggcagcaggaagctgttttaggttatgtgaaagagatgtttcctcatctctaaggcttaccagaagctctgatttgaagagaataaatggattttgcacaaaaccacaggaaagtcccggagctccattcccgcacttacaacagagtgcctttacacaaacctacggattggcagaaaaagatcctcatatggtcaggtcgcttcaaaaggaagatgaaatcccagagactgtctcgttggagatgcttgatgctgcaaagaacaagatgcgagtgaagatcagctatctaatgattgccctgacggtggtaggatgcatctttcattggttattgagggcaagaagcttgcccaaagaccgagactttaaccagcttggacctttagaaaagaaagctcgtctgaaagaaggaagcagctatgaaggccaaaacagattaccaaaggtatccgtgttggttgggattttgaaaatccaggaattatgttttaacgtgcctgtattaaaaaggatgtggtatgaggatccatttcataaagtatgatttgcccaaacctgtaccatttccgtatttctgctgtagaagtagaaataaattttcttaaataatgactgtgttttattgttttgatccaagtcaagtgtagcctctcagccttttggagaaaaatgaaacaatttatttcaacttgaataccaactcttcagagaagcaggtaccatatcttacttctcttcccattatcaaagtaacctctccacaggcgaactcattttgaggagataaggaaggccagttgagtatatggcccaggtgcagcttggagggccagccttctcaaatgtcctggtgtactggtggggaggctgccccctaatagagcgagcgctgagaagcagccagaccacattctataatctttgaacatgctggcagatggaggcttttaggagaatagttttttaaacattctgacaaggtccagccaggaatttctaaggacttagaaatcccagtgtcatggagttgcttgggggtcaacacaagtcacctcttagcttcatgccttagaattctcaactgggctgtttttcttaccacctgagaaactaaat

SEQ ID NO: 1481 - protein, 190 aa, Homo sapien
MGSLSGLRLAAGSCFRLCERDVSSSLRLTRSSDLKRINGFCTKPQESPGAPFPHLQQSAFTQTYGLAEKDPHMVRSLQKEDEIPETVSLEMLDAAKNKMRVKISYLMIALTVVGCIFHWLLRARSLPKDRDFNQLGPLEKKARLKEGSSYEGQNRLPKVSVLVGILKIQELCFNVPVLKRMWYEDPFHKV

SEQ ID NO: 1482 - DNA, 3327 bp, Homo sapien
tccagcaccaaagcggccgttctcggattccggagcgttctggagccccgagagacgccccggggttctagaagctccccggcggcgcccagtcccggcttcattcgggcgtccctccgaaacccactcgggtgcacgggtcgtcggcgagccgcgaccgggtcctggcgcgcaccatgatcgtggcggactccgagtgccgcgcagagctcaaggactacctgcggttcgccccgggcggcgtcggcgactcgggccccggagaggagcagagggagagccgggctcggcgaggccctcgagggcccagcgccttcatccccgtggaggaggtccttcgggagggggctgagagcctcgagcagcacctggggctggaggcactgatgtcctctgggcgagtagacaacctggcagtggtgatgggcctgcaccctgactactttaccagcttctggcgcctgcactacctgctgctgcacacggatggtcccttggccagctcctggcgccactacattgccatcatggctgccgcccgccatcagtgttcttacctggtaggctcccacatggccgagtttctgcagactggtggtgaccctgagtggctgctgggcctccaccgggcccccgagaagctgcgcaaactcagcgagatcaacaagttgctggcgcatcggccatggctcatcaccaaggaacacatccaggccttgctgaagaccggcgagcacacttggtccctggccgagctcattcaggctctggtcctgctcacccactgccactcgctctcctccttcgtgtttggctgtggcatcctccctgagggggatgcagatggcagccctgccccccaggcacctacaccccctagtgaacagagcagccccccaagcagggacccgttgaacaactctgggggctttgagtctgcccgcgacgtggaggcgctgatggagcgcatgcagcagctgcaggagagcctgctgcgggatgaggggacgtcccaggaggagatggagagccgctttgagctggagaagtcagagagcctgctggtgaccccctcagctgacatcctggagccctctccacacccagacatgctgtgctttgtggaagaccctactttcggatatgaggacttcactcggagaggggctcaggcaccccctaccttccgggcccaggattatacctgggaagaccatggctactcgctgatccagcggctttaccctgagggtgggcagctgctggatgagaagttccaggcagcctatagcctcacctacaataccatcgccatgcacagtggtgtggacacctccgtgctccgcagggccatctggaactatatccactgcgtctttggcatcagatatgatgactatgattatggggaggtgaaccagctcctggagcggaacctcaaggtctatatcaagacagtggcctgctacccagagaagaccacccgaagaatgtacaacctcttctggaggcacttccgccactcagagaaggtccacgtgaacttgctgctcctggaggcgcgcatgcaagccgctctgctgtacgccctccgtgccatcacccgctacatgacctgactcctgagcaggacctgggcccggttcagctccccacaaggacttctctgtctggagacagccccagacccttttgtgtcccatgcccaccctccccacgctgcagtgggcttgtgtgtgatgtgcagtcccgaagccacaccctcccttttcctcactggaatggacagttcattgcactgactctgggatctcagccctgctcctgggagctggaagagcacttggagatcctaagggaccacacccttcctccttcccctgcccacagaggcagagggcacaggaaagaagccgggccaagctcggaattaatgtgccacaagtgttgtggccttcctgaactgggaagtccctggctggcccccgggggagaggggcaaatgcctccgggactgacactccaggcagctttgccttctctcccctgtcatttccagatttcattacctcctacttgccattcacccatcaatgtgaaagtcagggtcacagctggtctgtgtgtccagttccctaaaagcctgttctgttgggcagcctgaggctgttgcccgaatcctagttcagttttttgacttcctttgccctttttcccttttctccatgcttaatggtgtgaggcgtcaggagagaggccaagtacataaaaaaaaaaaaaagcagattatctctagagagtttgagcctttgctggtcacattgccttctgaagaggagggagtattagattataaatcctctttattttggtcctttatgcttgaggttccaacctggagccacagtgtgtgagaggaggaggagagggagaattctgttctcccagagctgcacctgcctcgcagaggccagcaccccactctcctgcctccagtggccctgccgcagatgtctcccaaaaagttgagcctttctagatggcttaggtggcaccatggctcagcaggaggggcgggaggcaccagggttcttgtttggaccctgcccctgggccatggccaggtgaccatggctacattgccaaacctctgactgccacagctgcagactgagagggtgggtctgagtccccacaatgtctgaagctgcccctgggattctcaggccaacctgccaacagcaagcggattttcttgcaagatcagggaccccatttctgcagccagtgtctcctgggtgccttctgaggactcccacccccatcccagtatctcatctgtcccctctcctggggcttaagtgggttgcttccaggcagaagcagccaaggaccgattccaggcactttctgtagcaaatgactgtgaattacgacttctcttgcccttcttctagcagtctgtgcctcctctctgaccagtttggagggcactgaagaaaggcaagggccgtgctgctgctgggcggggcaggagaggagcctggccagtgtgccacattaaatacccgtgcaggcgcggagaagcaaccggcacccccttccggcctgaaagccctccctgcaagaaggtgtgcaggagagaagaggccccggcatggggatctgggttctagagggcatgtgatgactgtaaatgttcactgggtgggtagggagtggtatccagtgttcaagtgcagaaatctttggctttgctaccagttccatatgatgagaaataaacgttcgctgaggttttgtttcataaaaaaaaaaaaaaaaaaa

SEQ ID NO: 1483 - protein, 480 aa, Homo sapien
MIVADSECRAELKDYLRFAPGGVGDSGPGEEQRESRARRGPRGPSAFIPVEEVLREGAESLEQHLGLEALMSSGRVDNLAVVMGLHPDYFTSFWRLHYLLLHTDGPLASSWRHYIAIMAAARHQCSYLVGSHMAEFLQTGGDPEWLLGLHRAPEKLRKLSEINKLLAHRPWLITKEHIQALLKTGEHTWSLAELIQALVLLTHCHSLSSFVFGCGILPEGDADGSPAPQAPTPPSEQSSPPSRDPLNNSGGFESARDVEALMERMQQLQESLLRDEGTSQEEMESRFELEKSESLLVTPSADILEPSPHPDMLCFVEDPTFGYEDFTRRGAQAPPTFRAQDYTWEDHGYSLIQRLYPEGGQLLDEKFQAAYSLTYNTIAMHSGVDTSVLRRAIWNYIHCVFGIRYDDYDYGEVNQLLERNLKVYIKTVACYPEKTTRRMYNLFWRHFRHSEKVHVNLLLLEARMQAALLYALRAITRYMT

SEQ ID NO: 1484 - DNA, 615 bp, Homo sapien
ggggactccgggaggaggaacatggccgtggcggacctcgctctcattcctgatgtggacatcgactccgacggcgtcttcaagtatgtgctgatccgagtccactcggctccccgctccgggctccggctgcagagagcaaggagatcgtgcgcggctacaagtgggctgagtaccatgcggacatctacgacaaagtgtcgggcgacatgcagaagcaaggctgcgactgtgagtgtctgggcggcgggcgcatctcccaccagagtcaggacaagaagattcacgtgtacggctattccatggcctatggtcctgcccagcacgccatttcaactgagaaaatcaaagccaagtaccccgactacgaggtcacctgggctaacgacggctactgagcactcccagcccggggcctgctgcctccagcagccacttcagagccccgcctttgcctgcactcctcttgcagggctggccctgcctgctcctgcggcagcctctggtgacgtgctgtccaccaggccttggagacaggctagcctggccacagaattaaacgtgttgccacacctgccggcttcttaaaaaaaaaaaaaaaaaaaaaaaaaaaaa

SEQ ID NO: 1485 - protein, 188 aa, Homo sapien
MAVADLALIPDVDIDSDGVFKYVLIRVHSAPRSGLRLQRARRSCAATSGLSTMRTSTTKCRATCRSKAATVSVWAAGASPTRVRTRRFTCTAIPWPMVLPSTPFQLRKSKPSTPTTRSPGLTTATEHSQPGACCLQQPLQSPAFACTPLAGLALPAPAAASGDVLSTRPWRQASLATELNVLPHLPAS

SEQ ID NO: 1486 - DNA, 1545 bp, Homo sapien
ggcacgagggctgcctggcgctgcgggcggcgggccatggtggtttggattgagccgggcccggccggggcgccgagtcggagggggtggcagtgagcggcggcagaggctacggggctcggtttggctgactggggagtcggcaggcggcaggaaccatgcgaggccagcggagcctgctgctgggcccggcccgcctctgcctccgcctccttctgctgctgggttacaggcgccgctgtccacctctactccggggtctagtacagcgctggcgctacggcaaggtctgcctgcgctccctgctctacaactcctttgggggcagtgacaccgctgttgatgctgcctttgagcctgtctactggctggtagacaacgtgatccgctggtttggagtgggcaggaatgatatcgccaccgtctccatctgtaagaagtgcatttaccccaagccagcccgaacacaccactgcagcatctgcaacaggtgtgtgctgaagatggatcaccactgcccctggctaaacaattgtgtgggccactataaccatcggtacttcttctctttctgctttttcatgactctgggctgtgtctactgcagctatggaagttgggaccttttccgggaggcttatgctgccattgagacttatcaccagaccccaccacccaccttctcctttcgagaaaggatgactcacaagagtcttgtctacctctggttcctgtgcagttctgtggcacttgccctgggtgccctaactgtatggcatgctgttctcatcagtcgaggtgagactagcatcgaaaggcacatcaacaagaaggagagacgtcggctacaggccaagggcagagtatttaggaatccttacaactacggctgcttggacaactggaaggtattcctgggtgtggatacaggaaggcactggcttactcgggtgctcttaccttctagtcacttgccccatgggaatggaatgagctgggagccccctccctgggtgactgctcactcagcctctgtgatggcagtgtgagctggactgtgtcagccacgactcgagcactcattctgctccctatgttatttcaagggcctccaagggcagcttttctcagaatccttgatcaaaaagagccagtgggcctgccttagggtaccatgcaggacaattcaaggaccagcctttttaccactgcagaagaaagacacaatgtggagaaatcttaggactgacatccctttactcaggcaaacagaagttccaaccccagactaggggtcaggcagctagctacctaccttgcccagtgctgacccggacctcctccaggatacagcactggagttggccaccacctcttctacttgctgtctgaaaaaacacctgactagtacagctgagatcttggcttctcaacagggcaaagataccaggcctgctgctgaggtcactgccacttctcacatgctgcttaagggagcacaaataaaggtattcgatttttaaagataaaaaaaaaaaaaaaaaa

SEQ ID NO: 1487 - protein, 296 aa, Homo sapien
MRGQRSLLLGPARLCLRLLLLLGYRRRCPPLLRGLVQRWRYGKVCLRSLLYNSFGGSDTAVDAAFEPVYWLVDNVIRWFGVGRNDIATVSICKKCIYPKPARTHHCSICNRCVLKMDHHCPWLNNCVGHYNHRYFFSFCFFMTLGCVYCSYGSWDLFREAYAAIETYHQTPPPTFSFRERMTHKSLVYLWFLCSSVALALGALTVWHAVLISRGETSIERHINKKERRRLQAKGRVFRNPYNYGCLDNWKVFLGVDTGRHWLTRVLLPSSHLPHGNGMSWEPPPWVTAHSASVMAV

SEQ ID NO: 1488 - DNA, 3869 bp, Homo sapien
gagccggtggcgcaggtgtcggggtcctcgagcgcccagcctgggagcatgattgtggacaagctgctggacgacagccgcggcggagaggggctgcgggacgcggcgggcggctgcggcctcatgaccagcccgctcaacctgagctacttctacggcgcgtcgccgcccgccgccgccccgggcgcctgcgacgccagctgctcggtcttgggcccctcggcgcccggctcgcccggctccgactcctccgacttctcctctgcctcgtcggtgtcctcctgcggcgccgtggagtcccggtcgagaggcggcgcccgcgccgagcgccagccagttgagccccatatgggggttggcaggcagcagagaggcccctttcaaggtgttcgggtaaagaactcagtgaaggaactcctgttgcacatccgaagtcataaacagaaggcttctggccaagctgtggatgattttaagacacaaggtgtgaacatagaacagttcagagaattgaagaacacagtatcatacagtgggaaaaggaaagggcccgattcgttgtctgatggacctgcttgcaaaaggccagctctgttgcattcccaatttttgacaccacctcaaacaccaacgcccggggagagcatggaagatgttcatctcaatgaacccaaacaggagagcagtgctgatctgcttcagaacattatcaacattaagaatgaatgcagccccgtttccctgaacacagttcaagttagctggctgaaccccgtggtggtccctcagagctcccccgcagagcagtgtcaggacttccatggagggcaggtcttttctccacctcagaaatgccaaccattccaagtcaggggctcccaacaaatgatagaccaggcttccctgtaccagtattctccacagaaccagcatgtagagcagcagccacactacacccacaaaccaactctggaatacagtccttttcccatacctccccagtcccccgcttatgaaccaaacctctttgatggtccagaatcacagttttgcccaaaccaaagcttagtttcccttcttggtgatcaaagggaatctgagaatattgctaatcccatgcagacttcctccagtgttcagcagcaaaatgatgctcacttgcacagcttcagcatgatgcccagcagcgcctgtgaggccatggtggggcacgagatggcctctgactcttcaaacacttcactgccattctcaaacatgggaaatccaatgaacaccacacagttagggaaatcactttttcagtggcaggtggagcaggaagaaagcaaattggcaaatatttcccaagaccagtttctttcaaaggatgcagatggtgacacgttccttcatattgctgttgcccaagggagaagggcactttcctatgttcttgcaagaaagatgaatgcacttcacatgctggatattaaagagcacaatggacagagtgcctttcaggtggcagtggctgccaatcagcatctcattgtgcaggatctggtgaacatcggggcacaggtgaacaccacagactgctggggaagaacacctctgcatgtgtgtgctgagaagggccactcccaggtgcttcaggcgattcagaagggagcagtgggaagtaatcagtttgtggatcttgaggcaactaactatgatggcctgactccccttcactgtgcagtcatagcccacaatgctgtggtccatgaactccagagaaatcaacagcctcattcacctgaagttcaggagcttttactgaagaataagagtctggttgataccattaagtgcctaattcaaatgggagcagcggtggaagcgaaggatcgcaaaagtggccgcacagccctgcatttggcagctgaagaagcaaatctggaactcattcgcctctttttggagctgcccagttgcctgtcttttgtgaatgcaaaggcttacaatggcaacactgccctccatgttgctgccagcttgcagtatcggttgacacaattagatgctgtccgcctgttgatgaggaagggagcagacccaagtactcggaacttggagaacgaacagccagtgcatttggttcccgatggccctgtgggagaacagatccgacgtatcctgaagggaaagtccattcagcagagagctccaccgtattagctccattagcttggagcctggctagcaacactcactgtcagttaggcagtcctgatgtatctgtacatagaccatttgccttatattggcaaatgtaagttgtttctatgaaacaaacatatttagttcactattatatagtgggttatattaaaagaaaagaagaaaaatatctaatttctcttggcagatttgcatatttcatacccaggtatctgggatctagacatctgaatttgatctcaatggtaacattgccttcaattaacagtagcttttgagtaggaaaggactttgatttgtggcacaaaacattattaatatagctattgacagtttcaaagcaggtaaattgtaaatgtttctttaagaaaaagcatgtgaaaggaaaaaggtaaatacagcattgaggcttcatttggccttagtccctgggagttactggcgttggacaggcttcagtcattggactagatgaaaggtgtccatggttagaatttgatctttgcaaactgtatataattgttatttttgtccttaaaaatattgtacatacttggttgttaacatggtcatatttgaaatgtataagtccataaaatagaaaagaacaagtgaattgttgctatttaaaaaaattttacaattcttactaaggagtttttattgtgtaatcactaagtctttgtagataaagcagatggggagttacggagttgttcctttactggctgaaagatatattcgaattgtaaagatgctttttctcatgcattgaaattatacattatttgtagggaattgcatgcttttttttttttttctcccgagacagggtcttgctctggcgcccaggctggagtacagtggcatgatcttggctcacttcagccttgacttgggctcaagtgatcctcctacctgagccttctgagtaactgggactacaggtgtgcactcctcgcctggctaattttttattttttgtacaggcaggatcttgccaccttgcccaggctggtcttgaactcctgagctcatgccatctgcctgccttagtctcccaaaatgctgggattacaggagtgagccaccatgcccggctggcagttgcatggaagagaacacctctttatggcttaccctctagaatttctaatttatgtgttctgttgaaatttttgtttttttacctttattgaaacaacaaaaagtcagtattgaaacatatcttcctgttttctgttgtcaaatgatgataatgtgccatgatgttttatatatatcattcagaaaaagttttattttttaataacattctattaacattattttgcttgccgctggcatgcctgaggaatgtatttggctttgattacacactaagtttttgtaataaatttgactcattaaaaaccttttttttttaaaaaaaaaaaaaagaaaatctcattagtgaacttatctttgcagctgagtacttaaattctttttaaaaagataccctttggattgatcacattgtttgacccagtatgtcttgtagacacgttagttataatcaccttgtatctctaaatatggtgtgatatgaaccagtccattcacattggaaaaactgatggttttaaataaactaattcactaataaaaaaaaaaaaaaa

SEQ ID NO: 1489 - protein, 718 aa, Homo sapien
MIVDKLLDDSRGGEGLRDAAGGCGLMTSPLNLSYFYGASPPAAAPGACDASCSVLGPSAPGSPGSDSSDFSSASSVSSCGAVESRSRGGARAERQPVEPHMGVGRQQRGPFQGVRVKNSVKELLLHIRSHKQKASGQAVDDFKTQGVNIEQFRELKNTVSYSGKRKGPDSLSDGPACKRPALLHSQFLTPPQTPTPGESMEDVHLNEPKQESSADLLQNIINIKNECSPVSLNTVQVSWLNPVVVPQSSPAEQCQDFHGGQVFSPPQKCQPFQVRGSQQMIDQASLYQYSPQNQHVEQQPHYTHKPTLEYSPFPIPPQSPAYEPNLFDGPESQFCPNQSLVSLLGDQRESENIANPMQTSSSVQQQNDAHLHSFSMMPSSACEAMVGHEMASDSSNTSLPFSNMGNPMNTTQLGKSLFQWQVEQEESKLANISQDQFLSKDADGDTFLHIAVAQGRRALSYVLARKMNALHMLDIKEHNGQSAFQVAVAANQHLIVQDLVNIGAQVNTTDCWGRTPLHVCAEKGHSQVLQAIQKGAVGSNQFVDLEATNYDGLTPLHCAVIAHNAVVHELQRNQQPHSPEVQELLLKNKSLVDTIKCLIQMGAAVEAKDRKSGRTALHLAAEEANLELIRLFLELPSCLSFVNAKAYNGNTALHVAASLQYRLTQLDAVRLLMRKGADPSTRNLENEQPVHLVPDGPVGEQIRRILKGKSIQQRAPPY

SEQ ID NO: 1490 - DNA, 1039 bp, Homo sapien
atggggaggtcctccatgcgcagtcatgagtcgcttcaagtttatcgatattggtatcaacttgactgaccctatgttcagaggaatttataggggggttcaaaagcatcaagatgacttacaggatgtaatagggagagctgtcgagattggtgttaaaaagtttatgattacaggtggaaatctacaagacagtaaagatgcactgcatttggcacaaacaaatggtatgtttttcagtacagttggatgtcatcctacaagatgtggtgaatttgaaaagaataaccctgatctttacttaaaggagttgctaaatcttgctgaaaacaataaagggaaagttgtggcaataggagaatgcggacttgattttgaccgactgcagttttgtcccaaagatactcaactcaaatattttgaaaaacagtttgaactgtcagaacaaacaaaattaccaatgtttcttcattgtcgaaactcacatgctgaatttttggacataatgaaaagaaatagagatcggtgtgtagggggagtggtgcattcatttgatggtaccaaggaagcagcagctgctttgattgacttggatctttatataggatttaatggttgctcactgaaaactgaagctaatttggaagttttgaagtcaattcctagtgaaaaattaatgattgagacagatgcaccttggtgtggagtcaaaagtacacatgctggatcaaaatatataagaactgcatttcctaccaaaaagaagtgggaaagtgggcactgcttaaaagacagaaatgaaccctgccatataattcaaatattggagataatgtcagcagtgagagatgaggatccactggaattagccaatacactatataacaatactattaaagtattttttcctggaatataattggtatatgtcttccactttccatcatgtatgtaaaatttcatagtaaaacttcctgatagtttcaataaagaaattatctgcaaaaaaaaaaaaaaaaaaaaaaaaaaaaaaaaaaaa

SEQ ID NO: 1491 - protein, 297 aa, Homo sapien
MSRFKFIDIGINLTDPMFRGIYRGVQKHQDDLQDVIGRAVEIGVKKFMITGGNLQDSKDALHLAQTNGMFFSTVGCHPTRCGEFEKNNPDLYLKELLNLAENNKGKVVAIGECGLDFDRLQFCPKDTQLKYFEKQFELSEQTKLPMFLHCRNSHAEFLDIMKRNRDRCVGGVVHSFDGTKEAAAALIDLDLYIGFNGCSLKTEANLEVLKSIPSEKLMIETDAPWCGVKSTHAGSKYIRTAFPTKKKWESGHCLKDRNEPCHIIQILEIMSAVRDEDPLELANTLYNNTIKVFFPGI

SEQ ID NO: 1492 - DNA, 2263 bp, Homo sapien
cggagcccctcggcggcgcccggcccaggacccgcctaggagcgcaggagccccagcgcagagaccccaacgccgagacccccgccccggccccgccgcgcttcctcccgacgcagagcaaaccgcccagagtagaagatggattggggcacgctgcagacgatcctggggggtgtgaacaaacactccaccagcattggaaagatctggctcaccgtcctcttcatttttcgcattatgatcctcgttgtggctgcaaaggaggtgtggggagatgagcaggccgactttgtctgcaacaccctgcagccaggctgcaagaacgtgtgctacgatcactacttccccatctcccacatccggctatgggccctgcagctgatcttcgtgtccacgccagcgctcctagtggccatgcacgtggcctaccggagacatgagaagaagaggaagttcatcaagggggagataaagagtgaatttaaggacatcgaggagatcaaaacccagaaggtccgcatcgaaggctccctgtggtggacctacacaagcagcatcttcttccgggtcatcttcgaagccgccttcatgtacgtcttctatgtcatgtacgacggcttctccatgcagcggctggtgaagtgcaacgcctggccttgtcccaacactgtggactgctttgtgtcccggcccacggagaagactgtcttcacagtgttcatgattgcagtgtctggaatttgcatcctgctgaatgtcactgaattgtgttatttgctaattagatattgttctgggaagtcaaaaaagccagtttaacgcattgcccagttgttagattaagaaatagacagcatgagagggatgaggcaacccgtgctcagctgtcaaggctcagtcgccagcatttcccaacacaaagattctgaccttaaatgcaaccatttgaaacccctgtaggcctcaggtgaaactccagatgccacaatggagctctgctcccctaaagcctcaaaacaaaggcctaattctatgcctgtcttaattttctttcacttaagttagttccactgagaccccaggctgttaggggttattggtgtaaggtactttcatattttaaacagaggatatcggcatttgtttctttctctgaggacaagagaaaaaagccaggttccacagaggacacagagaaggtttgggtgtcctcctggggttctttttgccaactttccccacgttaaaggtgaacattggttctttcatttgctttggaagttttaatctctaacagtggacaaagttaccagtgccttaaactctgttacactttttggaagtgaaaactttgtagtatgataggttattttgatgtaaagatgttctggataccattatatgttccccctgtttcagaggctcagattgtaatatgtaaatggtatgtcattcgctactatgatttaatttgaaatatggtcttttggttatgaatactttgcagcacagctgagaggctgtctgttgtattcattgtggtcatagcacctaacaacattgtagcctcaatcgagtgagacagactagaagttcctagtgatggcttatgatagcaaatggcctcatgtcaaatatttagatgtaattttgtgtaagaaatacagactggatgtaccaccaactactacctgtaatgacaggcctgtccaacacatctcccttttccatgactgtggtagccagcatcggaaagaacgctgatttaaagaggtcgcttgggaattttattgacacagtaccatttaatggggaggacaaaatggggcaggggagggagaagtttctgtcgttaaaaacagatttggaaagactggactctaaattctgttgattaaagatgagctttgtctacttcaaaagtttgtttgcttaccccttcagcctccaattttttaagtgaaaatataactaataacatgtgaaaagaatagaagctaaggtttagataaatattgagcagatctataggaagattgaacctgaatattgccattatgcttgacatggtttccaaaaaatggtactccacatacttcagtgagggtaagtattttcctgttgtcaagaatagcattgtaaaagcattttgtaataataaagaatagctttaatgatatgcttgtaactaaaataattttgtaatgtatcaaatacatttaaaacattaaaatataatctctataataaaaaaaaaaaaaaa

SEQ ID NO: 1493 - protein, 226 aa, Homo sapien
MDWGTLQTILGGVNKHSTSIGKIWLTVLFIFRIMILVVAAKEVWGDEQADFVCNTLQPGCKNVCYDHYFPISHIRLWALQLIFVSTPALLVAMHVAYRRHEKKRKFIKGEIKSEFKDIEEIKTQKVRIEGSLWWTYTSSIFFRVIFEAAFMYVFYVMYDGFSMQRLVKCNAWPCPNTVDCFVSRPTEKTVFTVFMIAVSGICILLNVTELCYLLIRYCSGKSKKPV

SEQ ID NO: 1494 - DNA, 1482 bp, Homo sapien
gaggcgccggcggccacgccgcggaaggcgcgggccgagcagagccgggcgttggagcccgcgcgcgcatggaggcgttgccggcagccccctgagggcagcggggagacaagacccggcgacctcgcgcatccctcgagccgccacgcgctctcgccaccgggcggcgacgggccgcggagccggcgcggccatggcgacgggcggccagcagaaggagaacacgctgcttcacctcttcgccggcgggtgtggaggcacagttggtgctattttcacttgtccactagaagtcattaagacacggttgcagtcttcaagattagctctccggacagtctactatcctcaggttcatctggggaccattagtggagctggaatggtgagaccaacatccgtgacacctggactctttcaggttctgaagtcgatcttggagaaagagggaccaaagtcactttttagaggcttgggtccaaatttggttggagttgcaccatcaagggctgtatactttgcatgttactccaaagccaaagagcaatttaatggcattttcgtgcctaacagcaatattgtgcatattttctcagctggctctgcagcttttatcacaaattccttaatgaatcctatatggatggttaaaacccgaatgcagctagaacagaaagtgaggggctctaagcagatgaatacactccagtgtgctcgttacgtttaccagaccgaaggcattcgtggcttctatagaggattaactgcctcgtatgctggaatttccgaaactataatctgctttgctatttatgaaagtttaaagaagtatctgaaagaagctccattagcctcttctgcaaatgggactgagaaaaattccacaagtttttttggacttatggcagctgctgctctttctaagggctgtgcctcctgcattgcttatccacacgaagtcataaggacgaggctccgggaagagggcaccaagtacaagtcttttgtccagacggcgcgcctggtgttccgggaagaaggctaccttgccttttatagaggactgtttgcccagcttatccggcagatcccaaatactgccattgtgttgtctacttatgagttaattgtgtacctgttagaagaccgtactcagtaacaggccggaaaattgtgctctagaagaataaaactgaaaaactctagagaattttttttccccattgatgtttagaaagtttgagactgaaacaggaaaggccataaaatatctggttcatatcacctgttggacatttccttttggattcatgctttctggaaggtttaaattcattaacgttaatagttaattataacttttttttaacttaagaggattcagggttaagcaccaactaaattaaatcatgctatttaatttaagtataaaaaaaaaaaaaaaaaaaaaaaaaaaaaaaaaaaaaaaaaaaaaaaaaaacc

SEQ ID NO: 1495 - protein, 321 aa, Homo sapien
MATGGQQKENTLLHLFAGGCGGTVGAIFTCPLEVIKTRLQSSRLALRTVYYPQVHLGTISGAGMVRPTSVTPGLFQVLKSILEKEGPKSLFRGLGPNLVGVAPSRAVYFACYSKAKEQFNGIFVPNSNIVHIFSAGSAAFITNSLMNPIWMVKTRMQLEQKVRGSKQMNTLQCARYVYQTEGIRGFYRGLTASYAGISETIICFAIYESLKKYLKEAPLASSANGTEKNSTSFFGLMAAAALSKGCASCIAYPHEVIRTRLREEGTKYKSFVQTARLVFREEGYLAFYRGLFAQLIRQIPNTAIVLSTYELIVYLLEDRTQ

SEQ ID NO: 1496 - DNA, 794 bp, Homo sapien
ggcagccgtctgtgccacccagagccggcgggccgctaggtccccggagaccctgctatggtgcgtgcgggcgccgtgggggctcatctccccgcgtccggcttggatatcttcggggacctgaagaagatgaacaagcgccagctctattaccaggttttaaacttcgccatgatcgtgtcttctgcactcatgatatggaaaggcttgatcgtgctcacaggcagtgagagccccatcgtggtggtgctgagtggcagtatggagccggcctttcacagaggagacctcctgttcctcacaaatttccgggaagacccaatcagagctggtgaaatagttgtttttaaagttgaaggacgagacattccaatagttcacagagtaatcaaagttcatgaaaaagataatggagacatcaaatttctgactaaaggagataataatgaagttgatgatagaggcttgtacaaagaaggccagaactggctggaaaagaaggacgtggtgggaagagcaagagggtttttaccatatgttggtatggtcaccataataatgaatgactatccaaaattcaagtatgctcttttggctgtaatgggtgcatatgtgttactaaaacgtgaatcctaaaatgagaagcagttcctgggaccagattgaaatgaattctgttgaaaaagagaaaaactaatatatttgagatgttccattttctgtataaaagggaacagtgtggagatgtttttgtcttgtccaaataaaagattcaccagtaaaaaaaaaaaaaa

SEQ ID NO: 1497 - protein, 192 aa, Homo sapien
MVRAGAVGAHLPASGLDIFGDLKKMNKRQLYYQVLNFAMIVSSALMIWKGLIVLTGSESPIVVVLSGSMEPAFHRGDLLFLTNFREDPIRAGEIVVFKVEGRDIPIVHRVIKVHEKDNGDIKFLTKGDNNEVDDRGLYKEGQNWLEKKDVVGRARGFLPYVGMVTIIMNDYPKFKYALLAVMGAYVLLKRES

SEQ ID NO: 1498 - DNA, 2973 bp, Homo sapien
gcggagccggggctggagagcggcgaccactgcggatctcggaaggaagaaatgatgtaaatcactcatccaaactttaaggtcaaaggtgagaaggaaggtcaggaagaacatggcctggccaaatgtttttcaaagagggtctctgctgtcccagttcagccatcatcatgttgtagtgttcctgctcactttcttcagttattcgttgctccatgcttcacgaaaaacatttagcaatgtcaaagtcagtatctctgagcagtggaccccaagtgcttttaacacgtcagttgagctgcctgtggagatctggagcagcaaccatttgttccccagtgcagagaaagcgactcttttcctcggcacactggataccattttcctcttctcctatgctgtgggcctattcatcagtggcatcgttggggatcggttgaatttgcgatgggttctgtcttttggcatgtgctcttctgcattagtggtgtttgtctttggtgcgctcacagaatggctgcgtttctacaacaaatggctgtactgctgcctgtggattgtgaacggcctgctgcagtccactggttggccctgtgtggttgctgttatgggcaactggtttgggaaagccggacgaggagttgtttttggtctctggagtgcctgtgcttcggtgggcaacattttgggagcgtgcctagcttcttctgttcttcagtatggttatgagtatgcctttctggtgacggcgtctgtgcagtttgctggtgggatcgttatcttctttggactcctggtgtcaccagaagaaattggtctctcgggtattgaggcagaagaaaactttgaagaagactcacacaggccattaattaatggtggtgaaaatgaagacgaatatgagccgaattattcaatccaagatgatagttctgttgcccaagtcaaggcgataagcttctaccaggcatgttgccttcctggagtcataccgtactcactggcctacgcctgcttgaagttagtgaattactccttcttcttctggctccccttttatctgagtaacaacttcggctggaaggaggcggaagccgacaagctgtccatttggtacgacgttggagggatcatagtatttagtgtctctgatccgggacaagctaggatggatgtgggttttctactttttcattctcatgacaagttgtacaattgtgtttatctcgccattaatagtgagggaaatattctctctcgtgctaaggagacaggctcacatattgagggagtgaccggtgcccgcgagacagaaagaacaatgtcagccacatcaggaccgctggggcttcgagtctgccctaatttgggtttgtctaggagctccagcctgatcttggattgtcaggcgtctctcaacactgccagccacctgagatgctgaccagcagtgaaggctgcactagttttctacactacaggaattactgttgatgatttttgctgttgtttcatgaatgtgccgagtgacttctgactctgccagcatctttgacctctgactctgcccgcgtctttgtttggcctattgaggtttagcgttttaaccttaactgttgttttggacttgaactttctctagccttgaaaatggagtgaacaggaggcaaagccacgcgtggtttgtgttggtggtatgttccacaaatggaagagatcattgcattttgctttggtaatgagtttacagagagtgggtcatctttgaagcatcaaatcctgatcaaatgctcaagctggaccgagctgcaagcctgccttggacaaagaatccctctgttcactgtggtgggaaagatcacactacatgcctgttgattggctcagtcactctgtgtctgatctaaacgtcattcagccctagaagcatgaattgcttcaaattattgtcaacttgttctcttccattttcattcaaattaactttgactcctggaagtattgagtcttcctttcaaggaccataaggtacatcagttatcttgaacattctgacgtgtaaaggaccataaggtacatcatttatcttgaacattccgacgtgtaactcacagccgaagcactccatcccagatttgttgtctgggaactttaggatcctctaggaagctaatctgcttagtctatttttagaggattgatctctggcacaaccagcttcctggagttacctcagcagaagactagaattagagaaaagggaaagaccttttcttctagtaagtgtcaagtacagatgctctttgacttatgatggggttatgtcccagtaaacccattggaagtcaaatgcatttaatacccctgactggacaccacagcttagcctcgtccaccctaaatgtactcagaacacttagaattgcccacagttgggcagaatcatctaacacaaactctattttataatcgagtgttgaatatatcatgtaatttattgaatattgtacattatgttgaaattgcaaccatttcacaccattgtaaagtccaaaaatcagaagctgaggactgtctgtacatgacattgaatcacatgaatggattactagggcctgaggggtgtccgttctttagaaaaatgtagagtatatatatcttcagggctgtgaattccatactagttatcaatattttaagatcattctgtatatacatattttaaattatgcaagcaaactaggaggagaatgtgcaattttgagggatacctaatttgcattcggttaggggatatttttcaacctcttgctttatactctgatatggggtgtgtttatgaacttgttaatgttatttaatcatgcagatttccaatcagtgtattgctcatttactgacaaaaagggaaaatacgaaacacagaaagggaaaataaactgacttttataatgaaaaaaaaaaaaaaaaaaa

SEQ ID NO: 1499 - protein, 443 aa, Homo sapien
MAWPNVFQRGSLLSQFSHHHVVVFLLTFFSYSLLHASRKTFSNVKVSISEQWTPSAFNTSVELPVEIWSSNHLFPSAEKATLFLGTLDTIFLFSYAVGLFISGIVGDRLNLRWVLSFGMCSSALVVFVFGALTEWLRFYNKWLYCCLWIVNGLLQSTGWPCVVAVMGNWFGKAGRGVVFGLWSACASVGNILGACLASSVLQYGYEYAFLVTASVQFAGGIVIFFGLLVSPEEIGLSGIEAEENFEEDSHRPLINGGENEDEYEPNYSIQDDSSVAQVKAISFYQACCLPGVIPYSLAYACLKLVNYSFFFWLPFYLSNNFGWKEAEADKLSIWYDVGGIIVFSVSDPGQARMDVGFLLFHSHDKLYNCVYLAINSEGNILSRAKETGSHIEGVTGARETERTMSATSGPLGLRVCPNLGLSRSSSLILDCQASLNTASHLRC

SEQ ID NO: 1500 - DNA, 1188 bp, Homo sapien
gtcaggtggcgtttgctgtggcggctaggcccgcgtgcgctggagacctccgcgctggcccccgcgagcctcctgccctggcccggcgctgcggctctgccgcggcggcagcatgggtggcccccggggcgcgggctgggtggcggcgggcctgctgctcggcgcgggcgcctgctactgcatttacaggctgacccggggtcggcggcggggcgaccgcgagctcgggatacgctcttcgaagtccgcagaagacttaactgatggttcatatgatgatgttctaaatgctgaacaacttcagaaactcctttacctgctggagtcaacggaggatcctgtaattattgaaagagctttgattactttgggtaacaatgcagccttttcagttaaccaagctattattcgtgaattgggtggtattccaattgttgcaaacaaaatcaaccattccaaccagagtattaaagagaaagctttaaatgcactaaataacctgagtgtgaatgttgaaaatcaaatcaagataaagatatacatcagtcaagtatgtgaggatgtcttctctggttctctgaactctgctgtgcagctggctggactgacattgttgacaaacatgactgttaccaatgaccaccagcacatgcttcacagttacattacagacctgttccaggtgttacttactggaaatggaaacacgaaggtgcaagttttgaaactgcttttgaatttgtctgaaaatccagccatgacagaaggacttctccgtgcccaagtggattcatcattcctttccctttatgacagccacgtagcaaaggagattcttcttcgagtacttacgctatttcagaatataaagaactgcctcaaaatagaaggccatttagctgtgcagcctactttcactgaaggttcattgtttttcctgttacatggagaagaatgtgcccagaaaataagagctttagttgatcaccatgatgcagaggtgaaggaaaaggttgtaacaataatacccaaaatctgattggtcatatttttccaaagagtaatgcagtctggatataaatgtattttctgtcttccttataaggggattctcccagctgctaaatttaaacagtaaatatcacattttgtcattaacacagaaaaaaaaaaaaaaaaaaaaaaaaa

SEQ ID NO: 1501 - protein, 308 aa, Homo sapien
MGGPRGAGWVAAGLLLGAGACYCIYRLTRGRRRGDRELGIRSSKSAEDLTDGSYDDVLNAEQLQKLLYLLESTEDPVIIERALITLGNNAAFSVNQAIIRELGGIPIVANKINHSNQSIKEKALNALNNLSVNVENQIKIKIYISQVCEDVFSGSLNSAVQLAGLTLLTNMTVTNDHQHMLHSYITDLFQVLLTGNGNTKVQVLKLLLNLSENPAMTEGLLRAQVDSSFLSLYDSHVAKEILLRVLTLFQNIKNCLKIEGHLAVQPTFTEGSLFFLLHGEECAQKIRALVDHHDAEVKEKVVTIIPKI

SEQ ID NO: 1502 - DNA, 782 bp, Homo sapien
ggcacgaggcccaggtaatttgagcaaaggccacagtgaactccggcgtggctgaggaaggaggaggcacccacaggctgctgggaggagagcataaggctcaaaatggaaaatcataaatccaataataaggaaaacataacaattgttgatatatccagaaaaattaaccagcttccagaagcagaaaggaatctacttgaaaatggatcggtttatgttggattaaatgctgctctttgtggcctcatagcaaacagtctttttcgacgcatcttgaatgtgacaaaggctcgcatagctgctggcttaccaatggcagggataccttttcttacaacagacttaacttacagatgttttgtaagttttcctttgaatacaggtgatttggattgtgaaacctgtaccataacacggagtggactgactggtcttgttattggtggtctataccctgttttcttggctatacctgtaaatggtggtctagcagccaggtatcaatcagctctgttaccacacaaagggaacatcttaagttactggattagaacttctaagcctgtctttagaaagatgttatttcctattttgctccagactatgttttcagcataccttgggtctgaacaatataaactacttataaaggcccttcagttatctgaacctggcaaagaaattcactgattttaaacaaatatgtaaacaaaaataaaatggtaaaaacagaaaaaaaaaaaaaaaaaaaaaaaaaaaaaaaaaaaaaaaaaaaaaaa

SEQ ID NO: 1503 - protein, 195 aa, Homo sapien
MENHKSNNKENITIVDISRKINQLPEAERNLLENGSVYVGLNAALCGLIANSLFRRILNVTKARIAAGLPMAGIPFLTTDLTYRCFVSFPLNTGDLDCETCTITRSGLTGLVIGGLYPVFLAIPVNGGLAARYQSALLPHKGNILSYWIRTSKPVFRKMLFPILLQTMFSAYLGSEQYKLLIKALQLSEPGKEIH

SEQ ID NO: 1504 - DNA, 845 bp, Homo sapien
ctgccagcacttaacttttccccctaccctgctcctcctcctccacagccgtctttctctttgcctcagccacttccttccttcgcctcaccctccccagtgcactgaagaaggtaaccgggtccagacccacgcggcgccagttctccggcgggaaggaaaaccgcgcagagaggcagcaatgaatgtggatcacgaggttaacctcttagtggaggaaattcatcgtttgggttcaaaaaatgctgatggaaagttaagcgtgaaatttggggtcctcttccgtgatgataaatgtgccaacctctttgaagcattggtaggaactcttaaagctgcaaaacgaaggaagattgtaacatatccaggagagctgcttctgcaaggtgttcatgatgatgttgacattatattactgcaagattaatgtggtttacatatctttatgtactgccattttttgtttctggtaaactggaatataaagtgaaagaacaaacatttgaacatacttaatgtatttttatagaactttgtaaacgaaaggagattcatgttttagaagtctgtccttttttatatcttgaaagaaaatctatgtatgatgctataaaataaatcctattatttttctcaggaatctggttaggaattgcaggcaatgagattttttgcggggcagggatgggaatgtttgttcataaataattagacattttctatagatatttgacattctgcgaaagcaacaagcaaactgaagaccaactcctatgagaaatattatgatgtttatgtaataaagacatgtaactgtcaaatttaaaaaaaaaaaaaaaaaaaaa

SEQ ID NO: 1505 - protein, 141 aa, Homo sapien
CQHLTFPPTLLLLLHSRLSLCLSHFLPSPHPPQCTEEGNRVQTHAAPVLRREGKPRREAAMNVDHEVNLLVEEIHRLGSKNADGKLSVKFGVLFRDDKCANLFEALVGTLKAAKRRKIVTYPGELLLQGVHDDVDIILLQD

SEQ ID NO: 1506 - DNA, 4310 bp, Homo sapien
  Unsure 2600: Unknown base
cctgcggctcccccggctttcggagcccgggggcggcctgtggcgcgcggagcccgcgccggactgcgcctctttggaccttgaggggaaacatgcgtttgcskwggatcrwttgaaattctgagkytrggatmcsmgsccgccygcctgmytckkccgmsscgcgggytttttcstatttttccttttgctttttttccttttctccctccgggtctcctttttgactccctccccctttatgctcgcccagccctccccctgctgctgagaagtgggggagggtctcggcctccaggttcccgccccaccggggcccgggcgagcatggggggcaagcagagcacggcggcccgctcccggggccccttcccgggggtctccaccgatgacagcgccgtgccgccgccgggaggggcgccccatttcgggcactaccggacgggcggcggggccatggggctgcgcagccgctcggtcagctcggtggcaggcatgggcatggaccccagcacggccgggggggtgccctttggcctctacacccccgcctcccggggcaccggcgactccgagagggcgcccggcggcggagggtctgcgtccgactccacctatgcccatggcaatggttaccaggagacgggcggcggtcaccatagagacgggatgctgtacctgggctcccgagcctcgctggcggatgctctacctctgcacatcgcacccaggtggttcagctcgcatagtggtttcaagtgccccatttgctccaagtctgtggcttctgacgagatggaaatgcactttataatgtgtttgagcaaacctcgcctctcctacaacgatgatgtgctgactaaagacgcgggtgagtgtgtgatctgcctggaggagctgctgcagggggacacgatagccaggctgccctgcctgtgcatctatcacaaaagctgcatagactcgtggtttgaagtgaacagatcttgtccggaacaccctgcggactgacctgcgggcttgcttgctgactcctctcaaagggacagagcgcccctgctccagggaggaggctcaccggaccctggggcagagctgagcttgggacaccagcgggaacagggcaccccttctgcactgacttccagatcatggttctcccttcctccctgaggacaccaaattggatgagagcaagtttgagagaagaatgaatcaactgctatccttcccctcacccctcagcccaggagggaaagggcattttctttttcatctttgaaaggcattgtgggtctgtctttaaagtgtttacaaaaaaaaattatataaaaaaaaagtctagtgtcgactggtgttttccctcgtgatgtttacagcttgctgtttgctgcccagccataacccactcagtgacagacgaacacagctaaggcctcgctgccagccttctgacggcgggcgagcacacggtctcttcccctgccccaactggccctctccaccaccaacttctctactttgggtttgtttggttttttccctctatttttctggctggttttttgctcttttctccccttgagaccctaatatcttgacttcattgccaaaaaacaacccattgagaactttcttcctactgatcccatctcttttcccttctttcctcctggttccggtcagttcagaggatttaacaatcacaagtgtcctgcaaaaatgcctgaacattattcttaggccctcgtggatttttttttttcagaaaacttaaacaaaaaaagacttactaagaaatatgtacagctacccctgttttcaggcactatgtttgagaacattttagccattgatgttcacacgtggcatcagcccatgcaagataggtttctgtatttatatattaaaatacaaaaaaaaacttataaaatgtttaaaaaaatgttcaaagcttgggagaaaagctttcttcattagtcaaggtgttttgatatggtattaaaatgtctaataaaagatggcactgcgtgattttattttaatgraagtgttatacaatcaagaaatgggggcaagggsctgccccccactccctcacctacctccttagcattccttcaggctgctactcggggctccaggtgtgtgaattggtcctcagatagtcaggcctgggtggagggagtggcaagtcargcgtgcctcctacaagcttcctaacctcttaagcatcatggaaccagtcagccctctgtggagtcattgtgccggacctctgaaaagatctgcaggggccaaratgttgcarccaccsgaggctgcarggwtygtgggttcttccaggtgtgggcccagcccccctccttycagcctttgctccccatcccacgttccactckccctgcctggtgkttgcgtctcagtgcttgamtcacgggcatgcttcattgaggcccaggaagaggccctggtttggggctgtgccagcttcagagcccttgaaccagaaccaactgctcaggctcacaaaagttggcaaaatgcgggctgggcaggcagctcggggcagggagcagcagtgcaggcctggcctgtgntccccgtgcccagcgggycscggagcagcattccagagcctcctgcagagccagcgaaggaaagctctagagggagacgactccaccgcctctctgctctgacccttctcaggcccgcctgatgtgctggaccatccccctgctgccacggcccctggctccgcagtcaccctccatcagatgcttccagaagcacctactctgtgcaagggcattcacaacaggccagtgggcaaacgtgagccagggccagcggagaaacactaaagaagacttcggtggttcagagcctgggtctcagcgcgggacccgtctggggttgaagaccttkggggctkttgtgagtyggtggcaggaacgtgggctytagamtgtgcattcaggctctcctacttggcagaatgatcttggggaaacgacttcatctgaacttcagatatttcacatgtgaagcggggacaaaaccatgcagctcagaggtccctgtgggggctgggggagctgccctgcaggtcttggcacatgcacagcaggctccccatagctttgtcaccacaaagggcactgttctattcacagcacctcctgcttctgcctggcaactgtgtctccctgtgctatatttaattccaccagcaaagctgkcggaggcagggcccagcctgaaaggagatctccttgcctgacccctgggacctgggaaatggaggcttcatgtgcccgccttgsskyttaaagcctgctggctttggcagtgccatgggtgagccgagcagctgtgaggtgggtggggcagggctgtagccacgccgggtgctattccaggctctaggggctggtgctcatccccacccccagcgacttccgtcctacctggcatgctgcagccctctgccggctgtggtgtcctgaatttggacccaggttgcctgctcttgttgtgggggtgggattggggctgtctgtgtttcccaggtggagctcatgtttgtgatcctctatctggacagctctccagaatcctgtgttgcccctgttctgcctttctgggatgggagagaaggtgagggagccggcgagccaggttctaccctctctgctaagggcctagcacgctttgatgaggttcctggacgtgagaccctcacaaagaccaaccattcctctaatagccatttaacggtactgcagttcatgggaaaatgtcctcattcttaggagatagatgctggattatataggtgaatgccttcaagaaatgtgtaatttaattccaaatagttccccccaaaatacacaaagcaaataaggccaaaatgttcattgttgaatctgcagtggctggtatttcagtgaacagtgtacttgttctttcaacttttctgtatgtttggaatttttcttaataaaagattgtgggaaatggtcatttgctgagcgcctcctagttgccaggcactggagggcgcatcaaagaagagtcctacccaggagggagagcgcagctgctgcaggattctcgcctggaagagtgggtggctggctggctggctggaaggggaggggcgagagggctgtctcggtgatgagcacacgcgtgctggggtggtttggggagagggctgagatttgtcaccagtgagcccttggcacggtctctgctccccaccagggcagcacgggacagaaacgtcacggaggagtagcctc

SEQ ID NO: 1507 - protein, 227 aa, Homo sapien
MGGKQSTAARSRGPFPGVSTDDSAVPPPGGAPHFGHYRTGGGAMGLRSRSVSSVAGMGMDPSTAGGVPFGLYTPASRGTGDSERAPGGGGSASDSTYAHGNGYQETGGGHHRDGMLYLGSRASLADALPLHIAPRWFSSHSGFKCPICSKSVASDEMEMHFIMCLSKPRLSYNDDVLTKDAGECVICLEELLQGDTIARLPCLCIYHKSCIDSWFEVNRSCPEHPAD

SEQ ID NO: 1508 - DNA, 1914 bp, Homo sapien
acgaggatccgggttccaacccagggggaaaaatgcggcctttgactgaagaggagacccgtgtcatgtttgagaagatagcgaaatacattggggagaatcttcaactgctggtggaccggcccgatggcacctactgtttccgtctgcacaacgaccgggtgtactatgtgagtgagaagattatgaagctggccgccaatatttccggggacaagctggtgtcgctggggacctgctttggaaaattcactaaaacccacaagtttcggttgcacgtcacagctctggattaccttgcaccttatgccaagggttttggggtggcagccaaatctacacaagactgcagaaaagtagaccccatggcgattgtggtatttcatcaagcagacattggggaatatgtgcggcatgaagagacgttgacttaaaacgaagccattccaaggacagacggctgtatggaaaggccgagctttgtttcctgtgtttgtgtggactccaccatcatgttgaattttgtcaacactctggcctcttcagggacttcttatttactgtactctctatcactgacaaatgcaggctggattcttattatatacagagatggctcaaaaatggggtttcagatctttgtgacgaaatagaatactgtttcatatttgaatcagaggggcttcttgttctgagaaataggttcaaaatcattggaaccaggaacaagaatagcttattgttatctgtgataacactgttttctaaacacaaggattttcttttttattaatatgcaacatagacattgccataacagaataataaaccacatgtggggttttaaaaatgaaatttggctaataggagcaattcagctatttttctatacagtaattggtgtgtggtatagaagaaaaacgggttcaaaccccacttctgccacctaccagctatatggccttgaatgagtcattcagctttaataaggttcattttcttctgtttaaaaagacacaaaacttgaaaatcagctttggccatctacctgagaattagaaagtctgatttttggaattagaaatcatgattgtaggctgggcacagtggctcgcgcctgtaatcccagcactttgggaggccaaggcggacggatcacttgaggttaggagtttgagaccagcctggccaacatggtgaaaccccatctctactaaaaaaaaaaaaaaattaggtgtggtgacacatggctgtggtcctagttacttgggaggctgaggcaggagaatggcttgaactggggaagcagagcttgcagtgagccaagatggtgccattgcactccagcctgggcgtgacagagtgagactccatctgattgtaaagcatctagtacagtgtccagtgccttggaaatgataggtatggaataaatggtaattatttttatattatatatattatgtattcctgttattaagtgtagagttttatgagtataatttgattttattaccttcttttttacaagctgttttctcagtatttttcttggatgggatgacgctaggctggaaagtttttttcatcactatgattttataaaacaattttttctatgaacctttacttacttgactggattggactaaaagcactgatcagaggccacgacataaaaattcagtccctttgtccttccccgtgcctcccaaagttactttaagatccttagaatatttctttaaatattttatagacaaaaaatttaaagactatctgtattgcaaaattaaactatttctttaatgaatatattgcttattttaagttccaaaggtgaagtctttaagaataaaacattaccaactcctgcttttatatgtaaaaaacaaaaaaaaaaaaaaaaaaaaa

SEQ ID NO: 1509 - protein, 133 aa, Homo sapien
MRPLTEEETRVMFEKIAKYIGENLQLLVDRPDGTYCFRLHNDRVYYVSEKIMKLAANISGDKLVSLGTCFGKFTKTHKFRLHVTALDYLAPYAKGFGVAAKSTQDCRKVDPMAIVVFHQADIGEYVRHEETLT

SEQ ID NO: 1510 - DNA, 2883 bp, Homo sapien
aacagatcttcatgaatgtcgctatctttgaggatgaagtttttgctggagttaccacacaccaggaactctttccacacagcctgctgagtgtgattgccaacttcatccctttctctgatctcaaccagagtccacggaacatgtaccaatgccagatgggtaagcaaactatgggctttccacttctcacttatcaagaccgatcggataacaaactgtatcgtcttcagactcctcagagtcccttggtgagaccctccatgtatgattattatgacatggataactatccaattgggaccaatgccatcgttgctgtgatttcttacactggctatgatatggaagatgccatgattgtgaataaggcctcttgggaacgaggctttgcccatggaagtgtctacaagtctgagttcatagacctctctgaaaaaattaaacaaggagatagtagcctggtgtttggcatcaaacctggtgacccacgcgttctgcagaagttagatgacgatggattgccgtttataggagcaaaactgcagtacggagatccgtattacagctacctcaacctcaacaccggggaaagttttgtgatgtactataagagtaaagaaaattgtgttgtggataacatcaaagtgtgcagtaatgacactgggagtggaaaattcaagtgtgtttgcatcactatgagagtgcctcggaacccaactatcggagataaatttgccagtcgccatgggcagaagggcattttaagcagattgtggccggctgaggacatgccttttactgagagtgggatggtcccagacattctgttcaatccccatggttttccatcccgcatgaccattgggatgttaattgagagtatggccgggaagtctgcagctttgcatggtctctgccatgatgctacacccttcatcttctcagaggagaactcggccttagaatactttggtgagatgttaaaggctgctggctacaatttctatggcaccgagaggttatatagtggcatcagtgggctagaactggaagcagacatcttcataggagtggtttattatcagcgcttacgccatatggtctcagacaaatttcaagtaaggacaactggagcccgagacagagtcaccaaccagcctattgggggaagaaatgtccagggtggaatccgttttggggagatggaacgggatgcgcttttagctcatggtacatcttttctccttcatgaccgcctcttcaactgctcagatcggtcggtagcccatgtgtgtgaagtgtggcagtttactctctccactgttggagaagccacccccttcttggtctgccatgcgcaacagaaaatacaactgtactctgtgtagtcgcagtgacactatcgatactgtttctgtgccttatgtttttcggtattttgtagctgaactggcagctatgaacatcaaagtgaaactggatgttgtttaacttgatgttgaccttttggattaaggggactatcagattaaagcaaaatgtaattttaattcaatgaagatatcattaccaggttactcttgagatttttcaacggtgttagaactctcaaccaagacctgaaaaccaagtatgcaaggtttctgaatctctctggtagattaactattgacaatgattttctgttatctttgttcaaaaagttcatgtcttctcaaaatatgaaatattgataaatggaagagcatacggtgacaagtctcctttccaaccccaggttccctacaccctgctctcagcaggcagtgagtgtcacacacctgttaatccatcttgagcaggacagtactatacaaatagaatgcaagctgtaatgtaattttatattttcttatagccacgttgaagtaaaaacaaacaggtacagtgttttttaccagctttatagaagtacagttgttacatatttaatgaatacaatttgatgggtctgactatatgcacacacctttgataccatcaccacaatcagggtaataaacatacctgtcatctccacaagtttcctcctgcccctttgttttttgctttttggttgctgttgagtttttgttttgtcttctgtggtaagaacacttaactcaagacctaccctcttaacaaatctttaagtgcacgatatagtattgttaattccaggcaccatgttgtacaacagatctttagaccttacttgtcttgcataactgaagctttatacctgttgaacaactctccatttccctggcccctagcaaccacccttctaccctgtttctatgagtttgactattacagatatctcatatagtgggatcatgcaatatttgtcctgtgactggcttatttcacttagcatagtgaaataagattcatccattttggaagccaggcatggtgctgtgcatctatagtccctgctatttgagaggctgaggtgggaggatcatttgagtgcaggagttcaaggacagcctgggtaatataggaagaccctgtcttgaagaccctgacctcaagtgatccacccacctcggcctccgaaagtgctaggattacaggtgtgagccactgtgcctggcctccggtgagtattttatatttagtctacacttccatacttggcttttttctgcttttatgttgatctgctttcatagcagtgtgtagagtgccacttatgttttctttcttgtgtacagtattttattgtatggatttaccatcccctgtgtatttaagttgttccattctttggccattataacttttttctgcaaatattctggtgacttatctttggccattataaactgttgataataaaaaaaaaaaaaaaaa

SEQ ID NO: 1511 - protein, 459 aa, Homo sapien
MNVAIFEDEVFAGVTTHQELFPHSLLSVIANFIPFSDLNQSPRNMYQCQMGKQTMGFPLLTYQDRSDNKLYRLQTPQSPLVRPSMYDYYDMDNYPIGTNAIVAVISYTGYDMEDAMIVNKASWERGFAHGSVYKSEFIDLSEKIKQGDSSLVFGIKPGDPRVLQKLDDDGLPFIGAKLQYGDPYYSYLNLNTGESFVMYYKSKENCVVDNIKVCSNDTGSGKFKCVCITMRVPRNPTIGDKFASRHGQKGILSRLWPAEDMPFTESGMVPDILFNPHGFPSRMTIGMLIESMAGKSAALHGLCHDATPFIFSEENSALEYFGEMLKAAGYNFYGTERLYSGISGLELEADIFIGVVYYQRLRHMVSDKFQVRTTGARDRVTNQPIGGRNVQGGIRFGEMERDALLAHGTSFLLHDRLFNCSDRSVAHVCEVWQFTLSTVGEATPFLVCHAQQKIQLYSV

SEQ ID NO: 1512 - DNA, 1598 bp, Homo sapien
agctgcggcgctgggctggcggcggcgagtccacgtgctccccgcggccggttgaaaccgttggcgggcgctggctgagaggcaatgtttgctgtcttccattggagtgactgaatttctacatgacggctttttgacaagacttaaaacctgtcttggatagagaatatttagccatttacctaaaaatggtattttttacatgcaatgcatgtggtgaatcagtgaagaaaatacaagtggaaaagcatgtgtctgtttgcagaaactgtgaatgcctttcttgcattgactgcggtaaagatttctggggcgatgactataaaaaccacgtgaaatgcataagtgaagatcagaagtatggtggcaaaggctatgaaggtaaaacccacaaaggcgacatcaaacagcaggcgtggattcagaaaattagtgaattaataaagagacccaatgtcagccccaaagtgagagaacttttagagcaaattagtgcttttgacaacgttcccaggaaaaaggcaaaatttcagaattggatgaagaacagtttaaaagttcataatgaatccattctggaccaggtgtggaatatcttttctgaagcttccaacagcgaaccagtcaataaggaacaggatcaacggccactccacccagtggcaaatccacatgcagaaatctccaccaaggttccagcctccaaagtgaaagacgccgtggaacagcaaggggaggtgaagaagaataaaagagaaagaaaggaagaacggcagaagaaaaggaaaagagaaaagaaagaactaaagttagaaaaccaccaggaaaactcaaggaatcagaagcctaagaagcgcaaaaagggacaggaggctgaccttgaggctggtggggaggaagtccctgaggccaatggctctgcagggaagaggagcaagaagaagaagcagcgcaaggacagcgccagtgaggaagaggcacgcgtgggcgcagggaagaggaagcggaggcactcggaagttgaaacagattctaagaagaaaaagatgaagctcccagagcatcctgagggcggagaaccagaagacgatgaggctcctgcaaaaggtaaattcaactggaagggaactattaaagcaattctgaaacaggccccagacaatgaaataaccatcaaaaagctaaggaaaaaggttttagctcagtactacacagtgacagatgagcatcacagatccgaagaggaactcctggtcatctttaacaagaaaatcagcaagaaccctacctttaagttattaaaggacaaagtcaagcttgtgaaatgaacatttgtgtatttaaaaattgaatccattctgctgacttcttcctttcactgctgtttataaaatgtgtaatgaattctaacaactcaaattttgctttttgaagctgtatttttaagttaagaaaatatatttttggtataacttttatgagaaaaataaaatatattctggtccaaaaaaaaaaaaaaaaaaaaaaaaaaaaaaaaaaaaaaaaaaaaaaaaaaaaaaaaaaaaaaaaaaaaaaaaaaaaaaaaaaaaaaaaaaaaa

SEQ ID NO: 1513 - protein, 379 aa, Homo sapien
MVFFTCNACGESVKKIQVEKHVSVCRNCECLSCIDCGKDFWGDDYKNHVKCISEDQKYGGKGYEGKTHKGDIKQQAWIQKISELIKRPNVSPKVRELLEQISAFDNVPRKKAKFQNWMKNSLKVHNESILDQVWNIFSEASNSEPVNKEQDQRPLHPVANPHAEISTKVPASKVKDAVEQQGEVKKNKRERKEERQKKRKREKKELKLENHQENSRNQKPKKRKKGQEADLEAGGEEVPEANGSAGKRSKKKKQRKDSASEEEARVGAGKRKRRHSEVETDSKKKKMKLPEHPEGGEPEDDEAPAKGKFNWKGTIKAILKQAPDNEITIKKLRKKVLAQYYTVTDEHHRSEEELLVIFNKKISKNPTFKLLKDKVKLVK

SEQ ID NO: 1514 - DNA, 808 bp, Homo sapien
tctcgctcaggctcggttttaccccggagtctattcgaagggggctgctacgtcagcgcgtctcagcgtaagacggcgctattccgctgtaacagcttccggcgggtcctggatgttgatgtcctgcatctaacgcggtgtaacccccgaagccgagcgagctccggaggaatttcagtatctgctacggtaacttcatcagcccgccaagatggcgatgcaagcggccaagagggcgaacattcgacttccacctgaagtaaatcggatattgtatataagaaatttgccatacaaaatcacagctgaagaaatgtatgatatatttgggaaatatggacctattcgtcaaatcagagtggggaacacacctgaaactagaggaacagcttatgtggtctatgaggacatctttgatgccaagaatgcatgtgatcacctatcgggattcaatgtttgtaacagataccttgtggttttgtactataatgccaacagggcatttcagaagatggacacaaagaagaaggaggaacagttgaagcttctcaaggagaaatatggcatcaacacagatccaccaaaataaatgttttctacattttcatttggactaaatcccacgaatgacaactaccacctttttttcctttttaattaatactaaatattgtgatttcttatttgaggttcaaaatgacctgcttgaaactttgatacatattggaatacattatgttaataaacttgtagctttttgtgaaacaaaaaaaaaaagtcgacgcggccggcaatttagtagtagtag

SEQ ID NO: 1515 - protein, 125 aa, Homo sapien
MAMQAAKRANIRLPPEVNRILYIRNLPYKITAEEMYDIFGKYGPIRQIRVGNTPETRGTAYVVYEDIFDAKNACDHLSGFNVCNRYLVVLYYNANRAFQKMDTKKKEEQLKLLKEKYGINTDPPK

SEQ ID NO: 1516 - DNA, 4826 bp, Homo sapien; identical to SEQ ID NO: 1321

SEQ ID NO: 1517 - protein, 984 aa, Homo sapien; identical to SEQ ID NO: 1322

SEQ ID NO: 1518 - DNA, 1848 bp, Homo sapien
gctctgcacccctgctgcttctgctttgaaggcggaggctccatgttgtcccctcagcgagtggcagcagctgcctcaagaggagcagatgatgccatggagagcagcaagcctggtccagtgcaggttgttttggttcagaaagatcaacattcctttgagctagatgagaaagccttggccagcatcctcttgcaggaccacatccgagatcttgatgtggtggtggtttcagtggctggtgccttccgaaagggcaagtccttcattctggattttatgctacgatacttatattctcagaaggaaagtggccattcaaattggttgggtgacccagaagaaccgttaacaggattttcctggagagggggatctgatccagaaaccactgggattcaaatctggagtgaagttttcactgtggagaagccaggtgggaagaaggttgcagttgttctgatggatacccagggggcatttgacagccagtcaactgtgaaagactgtgctgccatctttgctctaagcactatgactagttctgttcagatttataatttatctcagaacattcaagaagatgatcttcaacagctgcagctcttcacagaatacggtcgtctggcaatggatgaaattttccgaaagcctttccagacactgatgtttttggttagagataggagtttcccttatgaatatagctatggactccaaggaggaatggcatttttggataagcgtttacaggtgaaggaacatcaacatgaagaaattcagaatgttcgaaatcacattcactcatgtttctccgatgtcacctgctttctcttaccacatccaggactccaggtggccacaagccctgactttgatgggaaattaaaagatattgctggtgaattcaaagagcagttacaggcactgataccgtatgtattaaacccatctaagttaatggaaaaggagatcaatggctcaaaggtcacctgtcggggactactggagtattttaaggcatatattaaaatttatcaaggagaagatctgcctcaccccaagtccatgcttcaggccactgctgaagcctacaacttagcagctgcagcctctgccaaggacatttattataacaacatggaagaggtttgtgggggagagaaaccttatttgtctccagacattctagaggagaagcactgcgaattcaaacaacttgctctggaccattttaagaagaccaagaagatgggtgggaaggatttcagctttcgttaccagcaggagctggaggaggaaatcaaggaattatatgagaacttctgcaagcacaatggtagcaagaacgtcttcagcaccttccgaacccctgcagtgctgttcacgggcattgtagctttgtacatagcctcaggcctcactggcttcataggtcttgaggttgtagcccagttgttcaactgtatggttggactactgttaatagcactcctcacctggggctacatcaggtattctggtcaatatcgtgagctgggcggagctattgattttggtgccgcatatgtgttggagcaggcttcttctcatatcggtaattccactcaggccactgtgagggatgcagttgttggaagaccatccatggataaaaaagctcaatagcatcttaacgtgaagatcaaacaagaacacaacaagcccctactgatttctgggtttctgccacggccacaggttcatatccagaggaatggcagatctgagacgatccaggaagagctaaaacatggccctgtaataaatgagcagacctctataaaagaaaaaaaaaaaaaaaaaaaa

SEQ ID NO: 1519 - protein, 555 aa, Homo sapien
ALHPCCFCFEGGGSMLSPQRVAAAASRGADDAMESSKPGPVQVVLVQKDQHSFELDEKALASILLQDHIRDLDVVVVSVAGAFRKGKSFILDFMLRYLYSQKESGHSNWLGDPEEPLTGFSWRGGSDPETTGIQIWSEVFTVEKPGGKKVAVVLMDTQGAFDSQSTVKDCAAIFALSTMTSSVQIYNLSQNIQEDDLQQLQLFTEYGRLAMDEIFRKPFQTLMFLVRDRSFPYEYSYGLQGGMAFLDKRLQVKEHQHEEIQNVRNHIHSCFSDVTCFLLPHPGLQVATSPDFDGKLKDIAGEFKEQLQALIPYVLNPSKLMEKEINGSKVTCRGLLEYFKAYIKIYQGEDLPHPKSMLQATAEAYNLAAAASAKDIYYNNMEEVCGGEKPYLSPDILEEKHCEFKQLALDHFKKTKKMGGKDFSFRYQQELEEEIKELYENFCKHNGSKNVFSTFRTPAVLFTGIVALYIASGLTGFIGLEVVAQLFNCMVGLLLIALLTWGYIRYSGQYRELGGAIDFGAAYVLEQASSHIGNSTQATVRDAVVGRPSMDKKAQ

SEQ ID NO: 1520 - DNA, 707 bp, Homo sapien
ggcacgagggccatgacgagccggtccggaagaagaggtagggcgccgccgtgacagattagtcctaaagggaacggggttgttagttcaattggctaccggaaaaaaccaggctgggctgggcgccgccatgacaaccgataccggaaaaggcgggtcgttccccccggacagccctacgccggcaaaggtctcgagatgcaggcggccctagaggtcaccgctcgctactgtggccgggagctggagcagtatggccagtgtgtggcggccaagccggaatcctggcagcgggactgtcactaccttaagatgagcattgcccagtgcacatcctcccacccaatcatccgccagatccgccaggcctgtgctcagccttttgaggccttcgaggagtgtcttcgacagaacgaggcagctgtgggcaactgtgcagagcatatgcgccgcttcctgcagtgcgctgagcaggtgcagccgccacgctcacctgcaactgtggaggcacagccacttcctgcctcctgaggactcctctgacggcaggaaaactggacatgaatgactgcccccccgcccctcccctgcagagtggccagatggagtcctgagccctggacatgggcccggctttcctggatatcaggacttccaataaataaagactctgtatactgggaaaaaaaaaaaaaaaaaaaaaaaaa

SEQ ID NO: 1521 - protein, 110 aa, Homo sapien
MQAALEVTARYCGRELEQYGQCVAAKPESWQRDCHYLKMSIAQCTSSHPIIRQIRQACAQPFEAFEECLRQNEAAVGNCAEHMRRFLQCAEQVQPPRSPATVEAQPLPAS

SEQ ID NO: 1522 - DNA, 2865 bp, Homo sapien
attgctggcctaggtgaaactgacggtctccattagaaacatggctgcgaccagtctagtgggtatttgtagaagagcctcagcgttcctgaaggcagcttgttccctagtaaatcccaaggacgctgctcactcgggttgcaggtcttctcttagtttgttgcctaagagtacaccaaatgtgacatcctttcaccaatatagattacttcataccacattgtcaaggaaaggactagaagaattttttgatgacccaaaaaactgggggcaagaaaaagtaaaatctggagcagcatggacctgtcagcaactaaggaacaaaagtaatgaagatttacacaaactttggtatgtcttactgaaagaaagaaacatgcttctaaccctagagcaggaggccaagcggcagagattgccaatgccaagtccagagcggttagataaggtagtagattccatggatgcattagataaagttgtccaggaaagagaagatgccctaaggcttcttcagactggtcaagaaagagctagacctggtgcttggagaagagacatctttggaagaatcatctggcacaagttcaagcagtgggttataccttggcacctaaataaaagatacaataggaaacgattctttgccttgccttatgtggaccattttctcagactggaacgtgagaaacgagcccgcatcaaagcacggaaggaaaatttagagagaaagaaagcaaaaattcttttaaaaaagtttccacatcttgctgaagcccaaaagtcaagtcttgtctaagatgtctgaactattaaatttaccattttgtttttcttgaatagtctgtgtacaggagtaaatatgttaagtggtttataaagaaattctgtttttagtcaagtgactttactaatcagttgttctaagtgtgaatatggcatgctaattagctaatttggtagaagctaatttgcttctaaaaatcaggtataaagttcagatgagattcccactttataaattctgacatttaagcaggctttaaatgtcacctgctaccttagagtgtgaaggtgatggtaactgccacagcaaaggcaataccgtagtttttgaatttgaataatagttttacctctgttgttaataggctatgaagaggatgtgggtattgctgttaataaacggaggactttgattcaaaataatgagaaatacatttagtccttaaagtagtaatcacagtgcacaacagtccaaaatatatttctggaatggctaatttttatttaattctgtaagcctaaggtaaaaagcataggcagtaacttttactagtcaataaaaagcagttctaccaatccactggtaattaatacactaaacagagttggaaagcattttactgaaagcaaaatatttagagaaaatagacatttatacaaaattataaaatgcttgtaataagaataagtgcatttcaaggaaagcacaaacttaatttatagagccagttaaagctttaaaaaatttaagtggaaattgaaatatgcaaaaatgtataaacattctacaaaagatggtcattcttttcctgagtatactaaagctatgaaacgtaaggtgacaaaaggaaggtagaagcttgggaactctttctcaagggcattttctttctacacactgcttccctccttcttcatattcttgcttggaaatccacatcccaacacttgtggtgacaacatgactgactcctaacattgtgtttcctgataaccccttcacattggaagggtcaaataatccttctggaatctttagccgctctgcaccaaaatcacaattgtagccattggggaattcataatgaacagttggcatctgtgcagccacttgttcatcataagttgaatctgacacttgaagtaccgaagcttgaaaatcctggataacacaattacacatataattgtgccaagacctcgtaacctgaggcaacttctcttttcttttccagtttgctggagatccttcacgaacagcttcttttgatgcaatcatatatggaggaaccaattcaatattcatttcttggaagagttctctgcactgcatagtaataaagtctccagcaagaggggatttcacaatgccttgttgaaggacatagccatcgtggactggaattgcagtggtatgagtggctccactgtccaaaatcagcccagtagaacgaccattagcaaatgctgtcaaaactgcagttttgcaaaggaagaaggcagggatgttgtagtgttcaaacattaactctgtcagtttctctctctttgctctagtattccacggtgcctctgacatgagaacaggatggagactggcttctgatttgacatgcattttgtaggtatgatccaaaatagcttggaaactatcccagtcttcaaccatcccattttttagaggtgaaatggcctccatattctccctcggaacacgcagagcattagtatctatgtagtaggtgggaccgccttgtttgcctttatcgccatctatttccattaatgtgcttccgtcatctctttctaccaccataccaatagctgtaggaaaatccaccttggggcagtcctcaccagcataaccagctctcacagtataggatccaatgtcaaaaacaagggctccaacttcatctcccccgtaccacgccgccgctcatggctgctgccggcgcgactcctaccctaagggctaactggcgaagtgactgcagtggccgcgactgcgagtctcgaggagcgatagcccctgactcccttaacttccaccgccacccacctcaggcaacaaagcgg

SEQ ID NO: 1523 - protein, 252 aa, Homo sapien [sequence omitted]

SEQ ID NO: 1524 - DNA, 3316 bp, Homo sapien
cttggggtggggaccgggtgaggggcctgacggcagagtcggtccagaactgcccggacagcgacgcacagcgaggagccaaaatggaagagggtgcaagtcccctcctggggccccagacgccccctcctttcttgctgcctggagcaggggcagtgctgttagtggctactcctggtgtgaacagcccatcctggccaccttccacaggaaacctgacctgaaggacagaagaggaaggaagcaggctttgccacaaatgtcagtgcagaactctggctggccccaccaagaagacagccccaagccccaggatccaggtccaccagccaactcagacagtgactcaggccacctgccgggggaggaccctgaggatacccatgctcaggaattcctgtctctgcacctgcttagaacatggggttttgactttaaactcattcacatgagtattcattatctctcctagggggtctgtattgtcaaaccagactctaggggctttggccccaaggcgtgaagggggttaagaagggaaagcataagaagggaagctgttttggggtgtggggcctccccagcctccctcaaggaagaccacacatgcaggcatcagtcagctatccttgcactcagtgaggatctgcaaggaggaccctcccaaatggagggcatgcttagaagctgctctagattggagaagaggtggcaatgatgagggggaaagaaggagaaaggaaagaaaaacctagtttcactcctccccttcttccatgtctcctcagggtcctgcagttctgagcttgggttccctttgcctggacaccaaccaagcccccaactggactggacttcagaccctcctgcagcaactccctccgcaggacattgatgagcgctactgcctggcccttggggaggaggagcgggccgagctgcagctcttctgtgccaggcggaagcaggaagccctgggacagggggtagcccgcctggtacttcccaagcttgaaggacacacctgtgagaagtgtagggagttgctgaagccaggggagtacggagtgtttgcagcccgggcaggggaacagcgctgctggcaccagccttgctttgcctgccaggcctgtggccaggccctgataaacctcatctacttctaccatgatggacaactctactgcggccgtcatcatgcagagttgctgcgcccgcgctgcccggcttgtgaccagctgatcttctcctggcgctgcaccgaggcggagggacagcgctggcatgagaaccacttctgttgccaggactgcgccgggcctctgggcgggggacgttatgccctgcctgggggaagcccctgctgccccagctgcttcgagaaccgctactcggatgcaggctcgagctgggccggggcactggaagggcaggcattccttggagcgcccccaccgcaccccccagacccaagcctcggggcccgcagctctcaccgcgcatccctggccggagcgttccaagggccgcccgaacccaccccgcgccgcggtcggggttgcggcgccagactccctcccaggcgcgggaggcggacgccctctggtggaggcgggggaccctggcgaggactctcggcggcggcggcggcgcgcacggcccaggggctgggcggggcgggaggctgggcctcacccccactagctgcggtgtaggtccagctccgcggctctgagaccagcgtttccgacccggcccggaacaggggagactggactcgaccgaactgaaggaagggaccaaacctcggtgaactctgcaaccctctcccgaacactccttgctgctgccggcggttccagcctgcaaactcagagggggctgcctggatccagtccccagcaggagaaccgacctggggacaaagcggaggcacccaaagggcaggagcaatgccgcctggagactattcgtgatcccaaggacacccctttctccacctgctcctcctcctctgactcggaacctgaaggatttttcttaggcgagcgccttccccagtcctggaagacccccggaagcctccaagcagaggacagcaacgcctctaagacgcactgcaccatgtgctagtggcgcagctcagagaggggatgtgagtgggaggaaaggggtctgtaaagcgggagaacaaggctagcctccccctaacaatcctagactgagacgcagtcaggcgcacgcccgcaagaggcggcgaggtgacaagtttggagtgcgcccccttcagtactgcgcgttctaagacttttggcggagactttcttggcaaaacccattccccaaagctacgcttcccctgctgagatagcccctacccccacctccacaggctgggacagccccgtccccaccatcctcctcccaagccaattaaatgatcacagcacgcgtgacagttaccggctggagagccggaggtgggaccgggagcaggggaccgtagaaccgggccgcgctcctcccctcctagagttcgtggaggcgcagcagagggccgtccctcttccggatgtcggactaagcgaacagcgcccccactgccggccggtagcagccggaagtgccagaccggaggtgcgtcattcaccggcgacgccgatacggttcctccagcgaggcccatgcgaagctttccactatggcttccagcactgtcccggtgagcgctgctggctcggctaatgaaactcccgaaataccggacaacgtgggagattggcttcggggcgtctaccgctttgccactgataggaatgacttccggaggaacttgatactaaatttgggactctttgctgcgggagtttggctggccaggaacttgagtgacattgacctcatggcacctcagccaggggtgtagccaagtagttctaatgccacctgtcgtcttatcatctgattgcagacaaatggaatcctgtgctgaacccgaatcttccaaaaaacagcctacaatctgtgaccaccacaagatgtgccctgatggcagctgaagtttgattcagatgggcacttttcttccccttccctgcctagtttccttttgttccttgagtccacgcagaattccattctctggtcagcagacaggcttaagctaaagtattgcctctattctgtaaagttctgtacatagttcccaagcttctgcagggggtgatttttgctcttgtcctgagaaataacagtgctgttttaaaaaacatttgaaataaataccgcacacaaaggaaaaaaaaaaaaaaaaaaa

SEQ ID NO: 1525 - protein, 312 aa, Homo sapien
MSPQGPAVLSLGSLCLDTNQAPNWTGLQTLLQQLPPQDIDERYCLALGEEERAELQLFCARRKQEALGQGVARLVLPKLEGHTCEKCRELLKPGEYGVFAARAGEQRCWHQPCFACQACGQALINLIYFYHDGQLYCGRHHAELLRPRCPACDQLIFSWRCTEAEGQRWHENHFCCQDCAGPLGGGRYALPGGSPCCPSCFENRYSDAGSSWAGALEGQAFLGAPPPHPPDPSLGARSSHRASLAGAFQGPPEPTPRRGRGCGARLPPRRGRRTPSGGGGGPWRGLSAAAAARTAQGLGGAGGWASPPLAAV

SEQ ID NO: 1526 - DNA, 3420 bp, Homo sapien
gggccgagccatgcaggcgtcgcgcgtggactacatcgctccctggtgggtcgtgtggctgcacagcgtcccgcacgtcggcctgcgcctgcagcccgtgaacagcaccttcagccccggcgacgagagttaccaggagtcgctgctgttcctggggctggtggccgccgtctgcctgggcctgaacctcatcttccttgtggcttacctggtctgtgcatgccactgccggcgggacgatgcggtgcagaccaagcagcaccactcctgctgcatcacctggacggccgtggtggccgggctcatctgctgtgctgcggtgggcgttggtttctatggaaacagcgagaccaacgatggggcgtaccagctgatgtactccttggacgatgccaaccacaccttctctgggatcgatgctctggtttccggaactacccagaagatgaaggtggacctagagcagcacctggcccggctcagtgagatctttgctgcccggggcgattacctgcagaccctgaagttcatacagcagatggcgggcagcattgttgttcagctctcaggactgcccgtgtggagggaggtcaccatggagctgaccaagctatccgaccagactggctacgtggagtactacaggtggctctcctacctcctgctctttatcctggacctggtcatctgcctcattgcctgcctgggactggccaagcgctccaagtgtctcctggcctcgatgctgtgctgtggggcactgagcctgctcctcagttgggcatccctggccgctgatggctctgcggcagtggccaccagtgacttctgtgtggctcctgacaccttcatcctgaacgtcacggagggccagatcagcacagaggtgactcgctactacctgtattgcagccagagtggaagcagccccttccagcagaccctgaccaccttccagcgcgcacttaccaccatgcagatccaggtcgcggggctgctgcagtttgccgtgcccctcttctccactgcagaggaagacctgcttgcaatccagctcctgctgaactcctcagagtccagccttcaccagctgaccgccatggtggactgccgagggctgcacaaggattatctggacgctcttgctggcatctgctacgacggcctccagggcttgctgtaccttggcctcttctccttcctggccgccctcgccttctccaccatgatctgtgcagggccaagggcctggaagcacttcaccaccagaaacagagactacgatgacattgatgatgatgacccctttaacccccaagcctggcgcatggcggctcacagtcccccgaggggacagcttcacagcttctgcagctacagcagtggcctgggaagtcagaccagcctgcagcccccggcccagaccatctccaacgcccctgtctccgagtacatgaaccaagccatgctctttggtaggaacccacgctacgagaacgtgccactaatcgggagagcctcccctccgcctacgtactctcccagcatgagagccacctacctgtctgtggcggatgagcacctgaggcactacgggaatcagtttccagcctaacagactttcgggggttcctgcctcctttttccgttctggtttttaattagtgcaaatacaagctgcgtttctttaatagaaaccaaaggcatctggagcccgagaggcctcctgctgggcagaggagcagctgggattcccgaccaaagccccagggggtgcagaagactcaccacgcgggccagcctctctcttttgccctgctctccacaccagaaatgcccccaggtgcttggctgcctcagaggtaccatccctgagctggctgcctggccctgctcacccctacgcctcgcccttgccaggaggggagtggcagtgaggagggggccaggtcaggcaccaccatcaagagagctgtgtgttctctctggtcccacaacgatgactctgcctcttgtcagcccagccaagagcccagacgacccctctgtcctcgttccctgtcctcgttccctgcaggtaacatgagaagggctgatcaggagatgctctttaagaagttcgcacccctgctgacaccagaacaagccaaatcagagttccagggccagacaggctcttcctgggccacagaggggaggcatcaggaaagctctgcagtggggggctggtggctccggggctgggggatcacaggctggtgaaccccggtgggaacagaggtgaaagcctgccacattccgcctgtctccctaaccctccattgcctcgcctctattccagaatcaatgctgcagaatgtgttagctgcagataggcatggtctcaggtatgaacagacactttgaaacgactttaggtctttcttttctccagtgttttaaacatgttgattatccaaagaattgaaactcctagcacatccagtttttacaacagatttgcagctcattccttaccctggttaggtcactacttttgcagattttgctggcactgatctggagatctgcagatctggaggagacgggaaggagtcgattcttaaataaggatcagtgaggcatcctgtcccaagctactgtttggtggggatctgggttcatctcacccacagagggaggatctttaagaggagaaaaaagccaagagggaaagccagagttccctgttctaggggactagccaaatgcctacatcagctgtcccctccctgttgtctccaagtaagtttgccagaaaaggttttagcaaagtgctacaactgtgtctttataggaggataggcctctgccctgccccacccccaccacctgtccccacccagtgtcccaggccacaggagcttattggccaggagggaataatgtcccccaatactgcctgttgagggaccagagttggggtctttggtgcttccaacctcctgccaacctggagttcacaacaccagagccccacggcctcgcacactgaagcaggggcgtgcggtgactcggtgcttctgttttggaagaaccacctgtcatcaaaacatggacagcagggtgttctcagctcccagcgaagcctccacaacagaatggggccacagggcagccgggactccctgtctcacctacattaacccatgcatactgtatgccataaactcactttggtatatccgcgtcacatgcagagaggaactctgcgacgtcaaagtgttgcttcttaaagtttcattattggcaactagagggttgtttttaatgcatggaaactaaacagattcctcggggagttcctgaaggaaccaggtgggcaaacctttgcttatatacatgcggcctcacctggaagagaaataaaccacttgtact

SEQ ID NO: 1527 - protein, 534 aa, Homo sapien
MQASRVDYIAPWWVVWLHSVPHVGLRLQPVNSTFSPGDESYQESLLFLGLVAAVCLGLNLIFLVAYLVCACHCRRDDAVQTKQHHSCCITWTAVVAGLICCAAVGVGFYGNSETNDGAYQLMYSLDDANHTFSGIDALVSGTTQKMKVDLEQHLARLSEIFAARGDYLQTLKFIQQMAGSIVVQLSGLPVWREVTMELTKLSDQTGYVEYYRWLSYLLLFILDLVICLIACLGLAKRSKCLLASMLCCGALSLLLSWASLAADGSAAVATSDFCVAPDTFILNVTEGQISTEVTRYYLYCSQSGSSPFQQTLTTFQRALTTMQIQVAGLLQFAVPLFSTAEEDLLAIQLLLNSSESSLHQLTAMVDCRGLHKDYLDALAGICYDGLQGLLYLGLFSFLAALAFSTMICAGPRAWKHFTTRNRDYDDIDDDDPFNPQAWRMAAHSPPRGQLHSFCSYSSGLGSQTSLQPPAQTISNAPVSEYMNQAMLFGRNPRYENVPLIGRASPPPTYSPSMRATYLSVADEHLRHYGNQFPA

SEQ ID NO: 1528 - DNA, 1188 bp, Mus musculus
atggatgaagaacctgaaagaactaagcgatgggaaggaggctatgaaagaacatgggagattcttaaagaagatgaatctggatcacttaaagctacaatagaagacattctattcaaggcaaagagaaaaagagtatttgagcaccatggacaagttcgacttggaatgatgcgccacctttatgtggtagtagatggatcaagaacaatggaagaccaagatttaaagcctaatagactgacgtgtactttaaagttgttggaatactttgtagaggaatattttgatcaaaatcctattagtcagattggaataattgtaactaagagtaaaagagctgaaaaattgactgaactttcaggaaacccaagaaaacatataacgtctttgaagaaagctgtggatatgacctgccatggagagccatctctttataattccctaagcatagctatgcagactctaaaacacatgcctggacatacaagtcgagaagtactaatcatctttagcagccttacaacttgcgatccatctaatatttatgatctaatcaagaccctaaaggcagctaaaattagagtatctgttattggattgtctgcagaagttcgcgtttgcactgtacttgctcgtgaaactggtggcacgtaccatgttattttagatgaaagccattacaaagagttgctcacacatcatgttagtcctcctcctgctagctcaagttctgaatgctcacttattcgtatgggatttcctcagcacaccattgcttctttatctgaccaggatgcaaaaccctctttcagcatggcgcatttggatggcaatactgagccagggcttacattaggaggctatttctgcccacagtgtcgggcaaagtactgtgagctacctgttgaatgtaaaatctgtggtcttactttggtgtctgctccccacttggcacggtcttaccatcatttgtttcctttggatgcttttcaagaaattcccctagaagaatataatggagaaagattttgttatggatgtcagggggaattgaaagaccaacatgtttatgtttgtgctgtgtgccaaaatgttttctgtgtggactgtgatgtttttgttcatgattctctacactgttgccctggctgtattcataagattccagctccttcaggtgtttga

SEQ ID NO: 1529 - protein, 395 aa, Mus musculus
MDEEPERTKRWEGGYERTWEILKEDESGSLKATIEDILFKAKRKRVFEHHGQVRLGMMRHLYVVVDGSRTMEDQDLKPNRLTCTLKLLEYFVEEYFDQNPISQIGIIVTKSKRAEKLTELSGNPRKHITSLKKAVDMTCHGEPSLYNSLSIAMQTLKHMPGHTSREVLIIFSSLTTCDPSNIYDLIKTLKAAKIRVSVIGLSAEVRVCTVLARETGGTYHVILDESHYKELLTHHVSPPPASSSSECSLIRMGFPQHTIASLSDQDAKPSFSMAHLDGNTEPGLTLGGYFCPQCRAKYCELPVECKICGLTLVSAPHLARSYHHLFPLDAFQEIPLEEYNGERFCYGCQGELKDQHVYVCAVCQNVFCVDCDVFVHDSLHCCPGCIHKIPAPSGV

SEQ ID NO: 1530 - DNA, 570 bp, Homo sapien
ggccgtgccttctctcgcttcggactgcgcaacgctgcgctctgggctgacaggcggataaaacggtcccatcaagactgagaaaaagcacaccagctattggcacagcgtgggcagtggggcctacaggatgactgacttagtctacagagatcccggcgtacttaagcagatgaagactcttaagatgacagaaggtgatttttctggtgatcgaggacttccggggtaatgacagtgatgaaatgcaggggacctggttgcccccaagtttcctggcagtgtgtgatactgaggaggtgagcttgtttctggagctgtgctttaagattcatgttacatgtaaagctgtcctcatttgtgactatggacctatggagttgggacaatctctatgggaagcagaaggcaaggaccccggtcattttaggtagaaacaacagcatgctaatgcaaaaaattatgcagtgtgctactgaacttcagaggtgatcaataaaagaagaataaaaagactaataaaaaaaaaaaaaaaaaaaaaaaaaaaaaaaaaaaaaaaaaaaaaaaaaa

SEQ ID NO: 1531 - protein, 62 aa, Homo sapien
MQGTWLPPSFLAVCDTEEVSLFLELCFKIHVTCKAVLICDYGPMELGQSLWEAEGKDPGHFR

SEQ ID NO: 1532 - DNA, 1138 bp, Homo sapien
ccctttaaagggtgactcgtcccacttgtgttctctctcctggtgcagagttgcaagcaagtttatcagagtatcgccatgaagttcgtcccctgcctcctgctggtgaccttgtcctgcctggggactttgggtcaggccccgaggcaaaagcaaggaagcactggggaggaattccatttccagactggagggagagattcctgcactatgcgtcccagcagcttggggcaaggtgctggagaagtctggcttcgcgtcgactgccgcaacacagaccagacctactggtgtgagtacagggggcagcccagcatgtgccaggcttttgctgctgaccccaaaccttactggaatcaagccctgcaggagctgaggcgccttcaccatgcgtgccagggggccccggtgcttaggccatccgtgtgcagggaggctggaccccaggcccatatgcagcaggtgacttccagcctcaagggcagcccagagcccaaccagcagcctgaggctgggacgccatctctgaggcccaaggccacagtgaaactcacagaagcaacacagctgggaaaggactcgatggaagagctgggaaaagccaaacccaccacccgacccacagccaaacctacccagcctggacccaggcccggagggaatgaggaagcaaagaagaaggcctgggaacattgttggaaacccttccaggccctgtgcgcctttctcatcagcttcttccgagggtgacaggtgaaagacccctacagatctgacctctccctgacagacaaccatctctttttatattatgccgctttcaatccaacgttctcacactggaagaagagagtttctaatcagatgcaacggcccaaattcttgatctgcagcttctctgaagtttggaaaagaaaccttcctttctggagtttgcagagttcagcaatatgatagggaacaggtgctgatgggcccaagagtgacaagcatacacaactacttattatctgtagaagttttgctttgttgatctgagccttctatgaaagtttaaatatgtaacgcattcatgaatttccagtgttcagtaaatagcagctatgtgtgtgcaaaataaaagaatgatttcagaaat

SEQ ID NO: 1533 - protein, 223 aa, Homo sapien
MKFVPCLLLVTLSCLGTLGQAPRQKQGSTGEEFHFQTGGRDSCTMRPSSLGQGAGEVWLRVDCRNTDQTYWCEYRGQPSMCQAFAADPKPYWNQALQELRRLHHACQGAPVLRPSVCREAGPQAHMQQVTSSLKGSPEPNQQPEAGTPSLRPKATVKLTEATQLGKDSMEELGKAKPTTRPTAKPTQPGPRPGGNEEAKKKAWEHCWKPFQALCAFLISFFRG

SEQ ID NO: 1534 - DNA, 726 bp, Homo sapien
atggcacagcacggggcgatgggcgcgtttcgggccctgtgcggcctggcgctgctgtgcgcgctcagcctgggtcagcgccccaccgggggtcccgggtgcggccctgggcgcctcctgcttgggacgggaacggacgcgcgctgctgccgggttcacacgacgcgctgctgccgcgattacccgggcgaggagtgctgttccgagtgggactgcatgtgtgtccagcctgaattccactgcggagacccttgctgcacgacctgccggcaccacccttgtcccccaggccagggggtacagtcccaggggaaattcagttttggcttccagtgtatcgactgtgcctcggggaccttctccgggggccacgaaggccactgcaaaccttggacagactgcacccagttcgggtttctcactgtgttccctgggaacaagacccacaacgctgtgtgcgtcccagggtccccgccggcagagccgcttgggtggctgaccgtcgtcctcctggccgtggccgcctgcgtcctcctcctgacctcggcccagcttggactgcacatctggcagctgaggagtcagtgcatgtggccccgagagacccagctgctgctggaggtgccgccgtcgaccgaagacgccagaagctgccagttccccgaggaagagcggggcgagcgatcggcagaggagaaggggcggctgggagacctgtgggtgtga

SEQ ID NO: 1535 - protein, 241 aa, Homo sapien
MAQHGAMGAFRALCGLALLCALSLGQRPTGGPGCGPGRLLLGTGTDARCCRVHTTRCCRDYPGEECCSEWDCMCVQPEFHCGDPCCTTCRHHPCPPGQGVQSQGKFSFGFQCIDCASGTFSGGHEGHCKPWTDCTQFGFLTVFPGNKTHNAVCVPGSPPAEPLGWLTVVLLAVAACVLLLTSAQLGLHIWQLRSQCMWPRETQLLLEVPPSTEDARSCQFPEEERGERSAEEKGRLGDLWV

SEQ ID NO: 1536 - DNA, 2882 bp, Homo sapien
ggcacgagggacctgaagctggggaacatggtgctcaacaagaggacacatcggataaccatcaccaacttctgcctcgggaagcatctggtgagcgagggggacctgctgaaggaccagagagggagccctgcctacatcagtcccgacgtgctcagcggccggccgtaccgtggcaagcccagtgacatgtgggccctgggcgtggtgctcttcaccatgctgtatggccagttccccttctacgacagcatcccgcaggagctcttccgcaagatcaaggctgccgagtataccattcctgaggatggacgggtttctgagaacaccgtgtgtctcatccggaagctgctggtccttgacccccagcagcgcctggccgccgccgacgtcctggaggccctcagtgccatcattgcatcatggcagtccctgtcatctctgagtgggcctttgcaagtggttcctgacattgatgaccaaatgagcaatgcggatagctcccagcaggcgaaggtgacggaggagtgctcccagtacgagtttgagaactacatgcgtcagcagctgctgctggccgaggagaagagctccatccatgacgcccggagctgggtacccaagcggcagttcggcagcgcaccaccggtgcgacggctgggccacgacgcacagcccatgacctccttggacacggccatcctggcgcagcgctacctgcggaaataacagcctcagccggggccaccagcactgctgccacttcttccagccccagccaaaggcgtggctgtcagggctgggccctgtagtgctggactctcccgggccacaatagggacagggcagggacagggacagcccaggtcacacgtggggtcagcagaggtaccacgaagctaccttttgggatgattgctcgattgtttggtttttaaatctgagaagcctagataactaatctgcttttaatcacgatgttttaatctacctctgtctctttaaccatgctgtctctggactgagcaagagggaggagggagcctgctcaccccactccagggccttccccagcggccaccaactgacctggggcgctgctccccacagtccaaataagctgaaagtgcagctcgctgcaggccccagagcgagcttcccctcctccctgctctcccaggcccctgccacagcctctttccgtccctctctttctgatccaggcccctcagtccaagctttggaaaaccttcacctcatcttaaaccgaactcaaatatatttatttttttaccataccaacttctctcccatctctaggtggctcagtccatggccactccctgcccccagcctggctggacagcaaggaatccacagcccacacgtgagctccctcctcacccccaggcagggaagcccctcctgccagtccctgtcccctttcagcccaccagtccctctctgctgccggtgatgggaggcctttctagacctggctctttctctcccgtctcagtggcttctctgaggtgctgtacacgcgcgttaacctgttcccttctctatccttccccgtggtactgagctcacgtggactcccagtgcgaaggggcccatgggttgggctgcaggcctggccgtgagcgggggctgcctgcacgctcccctagcctactcttgtgtttaggggatggtgggaacatatcccagtgcccttgcctcataatagatgtggtgactctcccggtagaccctagcaagggtcctccatggtggtgagggactcaggagaattgtagggattgggggaccctgcctgcctggcttgagaacagccctgctgcccttttgagccgagattttgaagtggatgcccgtcttgccagaaatgctgttctcaccagaatgccccctccccttgcccttactggacttggccctgcctgatgccaagcaaagacccttccccagaggcctaccccccatatgtcctcagagaggctgagtgtcccctccaggcagtcatgggccctgaggcccctcctgcctggccctgctccccagtggggaggtgactgtgtttcccagagtgtgagccgctctcctccccctaaaaagctgactcactgtgagtgaccttgggcaagttcccaaacctccttgtgcctcagtttccccatctggaaaaaatggggccacctcttgccagcagtagcagggctgcccacgcccctttctccccatgccccatccagcacttgggcgactcatgcctctgcctcagtgggcctgtgggagcctactggagcccagcacttactccccctgagcagcgagcctgcgtctgtctcagctgtccagcgctgagggccagggtcttgtgctgtggggctgggggatgccctcttttctatatttatttcatagaaagtctcctgcgggagcggaaatgcagtccggcctagggctcccagcccttgactgtcctcctgtgagggcctgaagctgggccagggcccgtcgcagcggagccccctctcagcagcccaccgggtccctccaggctgctgcccgtgcgtggtctttctcctccttttcaaagcaatagccgccgggtctgcaaagccctgtcagacagactgggcccttccaaggtcaagccatgtgtctgatgacattcctggtgaagcaaaggagaggaggatgggtcagccctcactgggtgtcacacactgagagaagtcctattgtaaagaaacggaaaaagtcacaaaaaagtttgtataaagacatatttttgtactacatggggactcttcctgcatgtcagcaataaaacttcctgatctggaaaaaaaaaaaaaaaaaaaaaaaaaaaa

SEQ ID NO: 1537 - protein, 233 aa, Homo sapien
MVLNKRTHRITITNFCLGKHLVSEGDLLKDQRGSPAYISPDVLSGRPYRGKPSDMWALGVVLFTMLYGQFPFYDSIPQELFRKIKAAEYTIPEDGRVSENTVCLIRKLLVLDPQQRLAAADVLEALSAIIASWQSLSSLSGPLQVVPDIDDQMSNADSSQQAKVTEECSQYEFENYMRQQLLLAEEKSSIHDARSWVPKRQFGSAPPVRRLGHDAQPMTSLDTAILAQRYLRK

SEQ ID NO: 1538 - DNA, 921 bp, Homo sapien
tcctttggtgccttgtgaccagggccctgatggttcattagatggagccttcgagtcttagggagttgccgcagggtccccacagcggctcccgacggttgtgaaccagcatccatcctccacggattccggcaacccgcctggccctggacgtgtctcaactggcccgcgtgaggggccgccccggaaatgacgcgctgccccgctggccaagcggaagtggagatggcggagctgtacgtgaagccgggcaacaaggaacgcggctggaacgacccgccgcagttctcatacgggctgcagacccaggccggcggacccaggcgctcgctgcttaccaagagggtagccgcaccccaggatggatcccccagagtccccgcatcagagacttctcctgggcctcccccaatggggcctccacctccttcaagtaaggctcccaggtccccacctgtggggagtggtcctgcctctggcgtggagcccacaagtttcccagtcgagtctgaggctcgactgatggaggatgtgctgagacctttggaacaggcattggaagactgccgtggccacacaaggaagcaggtatgtgatgacatcagccgacgcctggcactgctgcaggaacagtgggctggaggaaagttgtcaatacctgtaaagaagagaatggctctactggtgcaagagctttcaagccaccggtgggacgcagcagatgacatccaccgctccctcatggttgaccatgtgactgaggtcagtcagtggatggtaggagttaaaagattaattgcagaaaagaggagtctgttttcagaggaggcagccaatgaagagaaatctgcagccacagctgagaagaaccataccataccaggcttccagcaggcttcataatcctcggttccccagact

SEQ ID NO: 1539 - protein, 237 aa, Homo sapien
MTRCPAGQAEVEMAELYVKPGNKERGWNDPPQFSYGLQTQAGGPRRSLLTKRVAAPQDGSPRVPASETSPGPPPMGPPPPSSKAPRSPPVGSGPASGVEPTSFPVESEARLMEDVLRPLEQALEDCRGHTRKQVCDDISRRLALLQEQWAGGKLSIPVKKRMALLVQELSSHRWDAADDIHRSLMVDHVTEVSQWMVGVKRLIAEKRSLFSEEAANEEKSAATAEKNHTIPGFQQAS

SEQ ID NO: 1540 - DNA, 1217 bp, Homo sapien
caactcatggcggcggcggcggcggcggcagctgcttgggcgcggtgcggtggtgactgagctacgagcctggcggcgggtgtgcgccgagccccggcccggcccggccctcgcgtgcctcccaggctccgcacccctgatgctgcgcgggtgctgagcccgcttcggccgggacgatggtgaagtatttcctgggccagagcgtgctccggagttcctgggaccaagtgttcgccgccttctggcagcggtacccgaatccctatagcaaacatgtcttgacggaagacatagtacaccgggaggtgacccctgaccagaaactgctgtcccggcgactcctgaccaagaccaacaggatgccacgctgggccgagcgactatttcctgccaatgttgctcactcggtgtacgtcctggaggactctattgtggacccacagaatcagaccatgactaccttcacctggaacatcaaccacgcccggctgatggtggtggaggaacgatgtgtttactgtgtgaactctgacaacagtggctggactgaaatccgccgggaagcctgggtctcctctagcttatttggtgtctccagagctgtccaggaatttggtcttgcccggttcaaaagcaacgtgaccaagactatgaagggttttgaatatatcttggctaagctgcaaggcgaggccccttccaaaacacttgttgagacagccaaggaagccaaggagaaggcaaaggagacggcactggcagctacagagaaggccaaggacctcgccagcaaggcggccaccaagaagcagcagcagcagcaacagtttgtgtagccagtctaccaccaccacagcaccccagacagctaggcttagcccctctgccctcccttcattgtactttatcattaaaaatcaacttccagccctgtctgctgtctacgtggtgggttgtggggatgcagtttggcatctgcagtacaccaagcacatgattcatgtctgagccaggtctgcttattctcccattgggcagctgaggaccgaggcacagaggtgcggtgacttgcccggggctccaggtagcctgcaggttaactggcggtaagtgctagactgtaagcccgacaagggcagggcttttggttttgttctctgatgtgtctcagtatctagcacataatagacactcaataaatacttgttgaattcaaa

SEQ ID NO: 1541 - protein, 219 aa, Homo sapien
MVKYFLGQSVLRSSWDQVFAAFWQRYPNPYSKHVLTEDIVHREVTPDQKLLSRRLLTKTNRMPRWAERLFPANVAHSVYVLEDSIVDPQNQTMTTFTWNINHARLMVVEERCVYCVNSDNSGWTEIRREAWVSSSLFGVSRAVQEFGLARFKSNVTKTMKGFEYILAKLQGEAPSKTLVETAKEAKEKAKETALAATEKAKDLASKAATKKQQQQQQFV

SEQ ID NO: 1542 - DNA, 2112 bp, Homo sapien
ggtcgggaccggcaagatggcggcgcggacagcgttcggtgctgtgtgccggcgcctctggcagggattggggaatttttctgtaaacacttctaagggcaatacagccaaaaatggtggcttgcttctcagtaccaatatgaagtgggtacagttttcaaacctacacgttgatgttccaaaggatttgaccaaacctgtggtaacaatctctgatgaaccagacatattatataagcgcctctcggttttggtgaaaggtcacgataaggctgtattggacagttatgaatattttgctgtgcttgctgctaaagaacttggtatctctattaaagtacatgaacctccaaggaaaatagagcgatttactcttctccaatcagtgcatatttacaagaagcacagagttcagtatgaaatgagaacactttacagatgtttagagttagaacatctaactggaagcacagcagatgtctacttggaatatattcagcgaaacttacctgaaggggttgccatggaagtaacaaagacacaattagaacagttaccagaacacatcaaggagccaatctgggaaacactatcagaagaaaaagaagaaagcaagtcataaagcctcagggaggccatttttgcctaaatttgaaatgagggtgggccagatgagtatgtttaagtggagagtgcttccagctgagatgatttgagtctgtcctaactgctccattgagttctcgtgccctcatcagctgagggcagggaatggaactttaatggaagaaccacttttatctattctttttattcattgtttcagttctgatttcagcaaacatgagcaaaccactttgactgaaagcagaaagagtgaaaattctattttgttacgctactggtgttcaattattagtttgtaccatttttaatttatgtcagttgatgcatctgaaaataagtgcttggagtgttcgtacccttatttttttttaagattcctagaaggaatctttggttaattcagattgagcagttaaagtttttgctatttacctttgtgcaggctggcatatgctaatttgggggtggtaaccaaccgattttatctcatgtaagcattacattttgaagactgaatatacttcacagcagatcaaacacatttatggcatgcactgacctcttcttggagcccagaactttatagagttgcctaccagggttactgtaatggaatttatgatcttaagaaattactagttgtattatttatcctatgattcattcattcaataagcttttactgcataaactttacatccagcactgtagttaagtacccaaaattgaatagaaataatggcttttgaaaattgcacaaagcaggccaggcacggtggctcacgcctgtaatcccagcactttgggaggccgaggcaggcggatcacgaggtcaagagatccagaccatcctggctaacacggtgaaaccccgtctctaataaaaatacaaaaattagctggacatggtggcacgtgcctgtaatcccagctactcaggaggctgaggcaggagaatcgcgtgaacccgggcccggtggaggctgcagtgagacgagatcgcgccactgcactccagcctggcgacagagcgagacaccgtctcaaaaaaaaaaaaaaagaaaattgtgcaaagcataggtaaatatttttctttattaagcttctcactgagaagccctctttattttggtaaatgtcactctgtttgttaggagatgtctgcttttccatgaaatgaaatagtggctaaagccctgaaagaggcaagactacaatgggctgaaacagttggtatagcaaccccagagaagtgcttcattttctttttatagtagaagcaggtccatgtcttttgtggtttcctgcacatctttggagtagttatgacttctcagtttttccccccttaaactgcattgcctattcttttttcctgacatgctatcaggtatcagtgtgttgaatacataatgcttgtgtatcagacttacgttactgtcatcaccattaaaagaattgcagccttgtgccccatgaccttca

SEQ ID NO: 1543 - protein, 201 aa, Homo sapien
MAARTAFGAVCRRLWQGLGNFSVNTSKGNTAKNGGLLLSTNMKWVQFSNLHVDVPKDLTKPVVTISDEPDILYKRLSVLVKGHDKAVLDSYEYFAVLAAKELGISIKVHEPPRKIERFTLLQSVHIYKKHRVQYEMRTLYRCLELEHLTGSTADVYLEYIQRNLPEGVAMEVTKTQLEQLPEHIKEPIWETLSEEKEESKS

SEQ ID NO: 1544 - DNA, 447 bp, Homo sapien
atggcgtcggtggtgttggcgctgaggacccggacagccgttacatccttgctaagccccactccggctacagctcttgctgtcagatacgcatccaagaagtcgggtggtagctccaaaaacctcggtggaaagtcatcaggcagacgccaaggcattaagaaaatggaaggtcactatgttcatgctgggaacatcattgcaacacagcgccatttccgctggcacccaggtgcccatgtgggtgttgggaagaataaatgtctgtatgccctggaagaggggatagtccgctacactaaggaggtctacgtgcctcatcccagaaacacggaggctgtggatctgatcaccaggctgcccaagggtgctgtgctctacaagacttttgtccacgtggttcctgccaagcctgagggcaccttcaaactggtagctatgctttga

SEQ ID NO: 1545 - protein, 148 aa, Homo sapien
MASVVLALRTRTAVTSLLSPTPATALAVRYASKKSGGSSKNLGGKSSGRRQGIKKMEGHYVHAGNIIATQRHFRWHPGAHVGVGKNKCLYALEEGIVRYTKEVYVPHPRNTEAVDLITRLPKGAVLYKTFVHVVPAKPEGTFKLVAML

SEQ ID NO: 1546 - DNA, 613 bp, Homo sapien
gcagacgcaggggtcggcgccgggtgagagcgtgcggccggattcaccacaacatggcaaatctttttataaggaaaatggtgaaccctctgctctatctcagtcgtcacacggtgaagcctcgagccctctccacatttctatttggatccattcgaggtgcagcccccgtggctgtggaacccggggcagcagtgcgctcacttctctcacccggcctcctgccccatctgctgcctgcgctggggttcaaaaacaagactgtccttaagaagcgctgcaaggactgttacctggtgaagaggcggggtcggtggtacgtctactgtaaaacccatccgaggcacaagcagagacagatgtagaccctttccctccagagtcacgcacatactcgtcatcgcatcacttgggagaatggttgtatcttatggaaggaattatcacatcaaggagtcaggggaaagtgactggaagcaaacgccctaaaagttacccatcacgtttcagtgtaaatgagtaactatagaagacattgcgttatcttatttccaaaacgttccaactaaaaaacattttcctattaaaatagaccttccgataaaaaaaaaaa

SEQ ID NO: 1547 - protein, 103 aa, Homo sapien [sequence omitted]

SEQ ID NO: 1548 - DNA, 1174 bp, Homo sapien
tagtttgcgttttcacctggtcgcccggcggccatggcggccgttctgaagccggtgctgctgggccttcgagatgcgccggtgcacggcagccccacagggccgggtgcctggactgctagcaagctgggcggcattccggatgctctgcccaccgtggctgcgcccaggcccgtgtgtcagcgctgcgggcagccgctcgctctggtcgtgcaggtgtattgcccgctggaaggctccccgtttcaccgtctgctgcacgtgttcgcgtgcgcctgccccggctgtagcaccggcggtgcgcgcagctggaaggtgttccgctcccagtgcctgcaggtgccagagagagaggcgcaggacgctcagaaacagggaaacagccttgcagctgaggactggtgtgaaggtgctgatgactggggaagtgatactgaggaggggccttcaccacagtttaccttggattttgggaatgatgccagcagtgccaaagacgtagactggactgctcggctccaagacctccgcctgcaggatgctgtcctgggtgctgcccatcctgtgcctcctgggctgccgctcttcctgccctactacatctgtgttgcagatgaggatgattacagggactttgtcaacctggatcatgcccacagccttctgagggactatcagcagagagaaggcattgccatggatcagttgctttcccaaagccttcctaatgatggtgatgaaaaatatgagaagaccataattaaaagtggagatcagacgttttacaaattcatgaagcgaattgctgcttgtcaggagcagattttgaggtattcctggagtggagagccactctttttgacctgccctacatcagaagtcaccgagctcccagcctgcagccagtgtggaggccaaaggatatttgagtttcagcttatgccagcactggtcagcatgctcaagagtgctaatttaggtctttctgtggaatttggaacaattctagtttacacatgtgagaagagttgctggcccccaaatcatcagactcccatggaagaattttgtattatacaagaagacccagatgaattattgtttaagtagagcatttccttttattaatataaattaaaacaaatgtttacatccaaaaaaaaaaaaaaaaaaa

SEQ ID NO: 1549 - protein, 358 aa, Homo sapien
MAAVLKPVLLGLRDAPVHGSPTGPGAWTASKLGGIPDALPTVAAPRPVCQRCGQPLALVVQVYCPLEGSPFHRLLHVFACACPGCSTGGARSWKVFRSQCLQVPEREAQDAQKQGNSLAAEDWCEGADDWGSDTEEGPSPQFTLDFGNDASSAKDVDWTARLQDLRLQDAVLGAAHPVPPGLPLFLPYYICVADEDDYRDFVNLDHAHSLLRDYQQREGIAMDQLLSQSLPNDGDEKYEKTIIKSGDQTFYKFMKRIAACQEQILRYSWSGEPLFLTCPTSEVTELPACSQCGGQRIFEFQLMPALVSMLKSANLGLSVEFGTILVYTCEKSCWPPNHQTPMEEFCIIQEDPDELLFK

SEQ ID NO: 1550 - DNA, 728 bp, Homo sapien
cctcgccccgcctacgcgggaacccaaccgcggcgaccggacgtgcactcctccagtagcggctgcacgtcgtgcaatggcccgctatgaggaggtgagcgtgtccggcttcgaggagttccaccgggccgtggaacagcacaatggcaagaccattttcgcctactttacgggttctaaggacgccggggggaaaagctggtgccccgactgcgtgcaggctgaaccagtcgtacgagaggggctgaagcacattagtgaaggatgtgtgttcatctactgccaagtaggagaaaagccttattggaaagatccaaataatgacttcagaaaaaacttgaaagtaacagcagtgcctacactacttaagtatggaacacctcaaaaactggtagaatctgagtgtcttcaggccaacctggtggaaatgttgttctctgaagattaagattttaggatggcaatcatgtcttgatgtcctgatttgttctagtatcaataaactgtatacttgctttgaattcatgttagcaataaatgatgttaaaaaaactggcatgtgtctaaacaatagagtgctattaaaatgcccatgaacctttagtttgcctgtaatacatggatatttttaagatataaagaagtcttcagaaatagcagtaaaggctcaaaggaacgtgattcttgaaggtgacggtaatacctaaaaactcctaaaggtgcagagc

SEQ ID NO: 1551 - protein, 123 aa, Homo sapien
MARYEEVSVSGFEEFHRAVEQHNGKTIFAYFTGSKDAGGKSWCPDCVQAEPVVREGLKHISEGCVFIYCQVGEKPYWKDPNNDFRKNLKVTAVPTLLKYGTPQKLVESECLQANLVEMLFSED

SEQ ID NO: 1552 - DNA, 1235 bp, Homo sapien
ggcacgagggtcatcgccgcggggcggaggcgacagtgtctagcgggagctccgcgtgtagctacgccggccgcctggctttgagacaacgtgattctccgcagctggtcgcctacccgtgatgttctgcccacgtcgagacctgagctgaaatggcagacgatctcggagacgagtggtgggagaaccagccgactggagcaggcagcagcccagaagcatcagatggtgaaggagaaggagacacagaagtgatgcagcaggagacagttccagttcctgtaccttcagagaaaaccaaacagcctaaagaatgttttttgatacaaccaaaggaaagaaaagagaataccaccaagaccaggaaaagaagaaagaagaaaattactgatgttcttgcaaaatcagaaccaaaaccagggttacctgaagacctacagaagctgatgaaggactattatagcagcagacgcttggtgattgaattagaagaactgaacctgccagactcctgtttcctcaaggccaatgatttgactcacagtctttcctcatacctaaaaggaatttgtcctaagtgggtaaaacttaggaagaaccacagtgagaagaaatcggtcctgatgctgatcatctgcagctcggccgtccgagccctggagctcattaggtcgatgacagcattcagaggagacggcaaagttataaaattatttgcaaagcacataaaggtccaggcgcaggtaaagttgctggagaagcgtgtggtgcacctgggtgtaggaactccggggagaattaaagaacttgttaaacaaggtggccttaatttgagccccttaaaatttctggtttttgactggaactggagagatcagaagttgaggagaatgatggacattcccgagataagaaaggaggtattcgaacttctggaaatgggagtgctcagtctgtgcaagtcagaatccttgaaactgggccttttctaagtctgtgtcctaatgaagattccagttttcacagtagaagttgcatcttatttaatgactctgatacattgcaagcactcagtaaatatcagcaaatagtttatgttaattgtgtcaacagatggatcactggaatgtggggattctgaaacagaaatgaaactgtccttttgacaactctcttatataataaagtatcaccggcttgtgtatgaaaaaaaaaaaaaaaaaaaaaaaaaaaaa

SEQ ID NO: 1553 - protein, 279 aa, Homo sapien
MADDLGDEWWENQPTGAGSSPEASDGEGEGDTEVMQQETVPVPVPSEKTKQPKECFLIQPKERKENTTKTRKRRKKKITDVLAKSEPKPGLPEDLQKLMKDYYSSRRLVIELEELNLPDSCFLKANDLTHSLSSYLKGICPKWVKLRKNHSEKKSVLMLIICSSAVRALELIRSMTAFRGDGKVIKLFAKHIKVQAQVKLLEKRVVHLGVGTPGRIKELVKQGGLNLSPLKFLVFDWNWRDQKLRRMMDIPEIRKEVFELLEMGVLSLCKSESLKLGLF

SEQ ID NO: 1554 - DNA, 1317 bp, Homo sapien
gggtgttcgactgctagagccgagcgaagcgatgcctaaatcaaaggaacttgtttcttcaagctcttctggcagtgattctgacagtgaggttgacaaaaagttaaagaggaaaaagcaagttgctccagaaaaacctgtaaagaaacaaaagacaggtgagacttcgagagccctgtcatcttctaaacagagcagcagcagcagagatgataacatgtttcagattgggaaaatgaggtacgttagtgttcgcgattttaaaggcaaagtgctaattgatattagagaatattggatggatcctgaaggtgaaatgaaaccaggaagaaaaggtatttctttaaatccagaacaatggagccagctgaaggaacagatttctgacattgatgatgcagtaagaaaactgtaaaattcgagccatataaataaaacctgtactgttctagttgttttaatctgtctttttacattggcttttgttttctaaatgttctccaagctattgtatgtttggattgcagaagaatttgtaagatgaatacttttttttaatgtgcattattaaaaatattgagtgaagctaattgtcaactttattaaggattactttgtctgcccaccacctagtgtaaaataaaatcaagtaatacaatcttaactgttgtggccttttttgatcataagagttggtactgtttaaggccaaaagtaacagtttttatagatcttttagtttcaactcagcttttacaataaaaaggatttgtattgcattgagtttataaacttttggtttgtgaacttcatatttgatcttttctcttccaatcaaatgtctaggcttgtttgacttccacccccaatggtttttcactctttttatttacttcattttcctttaataacttaatctcttcatgttcagtttttacttcactctttattcttttctttgattatggtatgcttatttggaaagtcagtgaaactgtcaaaatgttatctcaataagatacttatatgagaactacaatcaccgaatctactgtattcaatattagcagatctaatttgataaacaacatggcttgtgtgaaaactgagcaggtgtttgtttacccatagtgttctgtgtagttattgcttagtctgcagaaaataatgacttagatgagatgtctgacttgctttcacttattaaacatgttcaccatgggatgatgtctgtaacatcagatattgttcaactagactaggatttaataaaaattgtgaaagcttaaaaaaaaaaaaaaaaaaaaaaaaaaaaaa

SEQ ID NO: 1555 - protein, 127 aa, Homo sapien
MPKSKELVSSSSSGSDSDSEVDKKLKRKKQVAPEKPVKKQKTGETSRALSSSKQSSSSRDDNMFQIGKMRYVSVRDFKGKVLIDIREYWMDPEGEMKPGRKGISLNPEQWSQLKEQISDIDDAVRKL

SEQ ID NO: 1556 - DNA, 753 bp, Homo sapien
attttccgggaagatggcggcgcacaagtcaggtccggcacatgtttccgcggagcggacccagcaatgacggatgatatcacctcttcttctctggtgagagtctgaggatagagacttttttctcaccatgaatgtcaccccagaggtcaagagtcgtgggatgaagtttgctgaggagcagctgctaaagcatggatggactcaaggcaaaggcctcggccggaaggagaatggtatcactcaggctctcagggtgacactgaagcaagacactcatggggtaggacatgaccctgccaaggagttcacaaaccactggtggaatgagctcttcaacaagactgcggccaacttggtagtggaaactgggcaggatggagtacagataaggagcctttctaaggagaccacccgttataatcatcccaagcccaacttgctgtatcagaagtttgtgaagatggccacattgacttcaggtggagagaagccaaacaaagacttggagagctgcagtgatgacgacaaccaggggtccaagtccccaaagattctgactgatgagatgctgctccaagcctgtgaggggcgaacagcacacaaggctgcccgtcttgggatcacaatgaaggccaagcttgctcgcctagaggcccaggagcaggccttcctggctcgtctcaaaggccaggaccctggggcccctcaactgcagtcagagagcaagccccccaaaaaaaaaaaaaaaaa

SEQ ID NO: 1557 - protein, 207 aa, Homo sapien
MNVTPEVKSRGMKFAEEQLLKHGWTQGKGLGRKENGITQALRVTLKQDTHGVGHDPAKEFTNHWWNELFNKTAANLVVETGQDGVQIRSLSKETTRYNHPKPNLLYQKFVKMATLTSGGEKPNKDLESCSDDDNQGSKSPKILTDEMLLQACEGRTAHKAARLGITMKAKLARLEAQEQAFLARLKGQDPGAPQLQSESKPPKKKKK

SEQ ID NO: 1558 - DNA, 4692 bp, Homo sapien
gtggacccagggtggggaactacctcttcctctccacgcggttgagaagaccggtcggcctgggcaacctgcgctgaagatgccgggaaaactccgtagtgacgctggtttggaatcagacaccgcaatgaaaaaaggggagacactgcgaaagcaaaccgaggagaaagagaaaaaagagaagccaaaatctgataagactgaagagatagcagaagaggaagaaactgttttccccaaagctaaacaagttaaaaagaaagcagagccttctgaagttgacatgaattctcctaaatccaaaaaggcaaaaaagaaagaggagccatctcaaaatgacatttctcctaaaaccaaaagtttgagaaagaaaaaggagcccattgaaaagaaagtggtttcttctaaaaccaaaaaagtgacaaaaaatgaggagccttctgaggaagaaatagatgctcctaagcccaagaagatgaagaaagaaaaggaaatgaatggagaaactagagagaaaagccccaaactgaagaatggatttcctcatcctgaaccggactgtaaccccagtgaagctgccagtgaagaaagtaacagtgagatagagcaggaaatacctgtggaacaaaaagaaggcgctttctctaattttcccatatctgaagaaactattaaacttctcaaaggccgaggagtgaccttcctatttcctatacaagcaaagacattccatcatgtttacagcgggaaggacttaattgcacaggcacggacaggaactgggaagacattctcctttgccatccctttgattgagaaacttcatggggaactgcaagacaggaagagaggccgtgcccctcaggtactggttcttgcacctacaagagagttggcaaatcaagtaagcaaagacttcagtgacatcacaaaaaagctgtcagtggcttgtttttatggtggaactccctatggaggtcaatttgaacgcatgaggaatgggattgatatcctggttggaacaccaggtcgtatcaaagaccacatacagaatggcaaactagatctcaccaaacttaagcatgttgtcctggatgaagtggaccagatgttggatatgggatttgctgatcaagtggaagagattttaagtgtggcatacaagaaagattctgaagacaatccccaaacattgcttttttctgcaacttgccctcattgggtatttaatgttgccaagaaatacatgaaatctacatatgaacaggtggacctgattggtaaaaagactcagaaaacggcaataactgtggagcatctggctattaagtgccactggactcagagggcagcagttattggggatgtcatccgagtatatagtggtcatcaaggacgcactatcatcttttgtgaaaccaagaaagaagcccaggagctgtcccagaattcagctataaagcaggatgctcagtccttgcatggagacattccacagaagcaaagggaaatcaccctgaaaggttttagaaatggtagttttggagttttggtggcaaccaatgttgctgcacgtgggttagacatccctgaggttgatttggttatacaaagctctccaccaaaggatgtagagtcctacattcatcgatccgggcggacaggcagagctggaaggacgggggtgtgcatctgcttttatcagcacaaggaagaatatcagttagtacaagtggagcaaaaagcgggaattaagttcaaacgaataggtgttccttctgcaacagaaataataaaagcttccagcaaagatgccatcaggcttttggattccgtgcctcccactgccattagtcacttcaaacaatcagctgagaagctgatagaggagaagggagctgtggaagctctggcagcagcactggcccatatttcaggtgccacgtccgtagaccagcgctccttgatcaactcaaatgtgggttttgtgaccatgatcttgcagtgctcaattgaaatgccaaatattagttatgcttggaaagaacttaaagagcagctgggcgaggagattgattccaaagtgaagggaatggtttttctcaaaggaaagctgggtgtttgctttgatgtacctaccgcatcagtaacagaaatacaggagaaatggcatgattcacgacgctggcagctctctgtggccacagagcaaccagaactggaaggaccacgggaaggatatggaggcttcaggggacagcgggaaggcagtcgaggcttcaggggacagcgggacggaaacagaagattcagaggacagcgggaaggcagtagaggcccgagaggacagcgatcaggaggtggcaacaaaagtaacagatcccaaaacaaaggccagaagcggagtttcagtaaagcatttggtcaataattagaaatagaagatttatatagcaaaaagagaatgatgtttggcaatatagaactgaacattatttttcatgcaaagttaaaagcacattgtgcctccttttgaccacttgccaagtccctgtctctttcagacacagacaagcttcatttaaattatttcatctgatcattatcatttataactttattgttacttcttcatcagtttttccttttgaaaggtgtatgaattcattacatttttattctaatgtattatctgtagattagaagataaaatcaagcatgtatctgcctatactttgtgagttcacctgtctttatactcaaaagtgtcccttaatagtgtccttccctgaaataaatacctaagggagtgtaacagtctctggaggaccactttgagcctttggaagttaaggtttcctcagccacctgccgaacagtttctcatgtggtcctattatttgtctactgagacttaatactgagcaatgttttgaaacaagatttcaaactaatctgggttgtaatacagtttataccagtgtatgctctagacttggaagatgtagtatgtttgatgtggattacctatacttatgttcgttttgatacatttttagcttctcattataaggtgattcatgctttagtgaattcttcatagatagtatatataaaagtacattttaatagaaagccagggttttaaggaatttcacatgtataaggtggctccatagctttatttgtaagtaggctggataaatggtgcttaaatggtaatgtactccacttcttcctattggaagattaacattatttaccaagaaggacttaagggagtaaggggcgcagattagcattgctcaagagtatgtaaaaaaaaaaaaaaaaaaaagaaccaaaccactggaaataatcaaatgcaaaaaggtaacaaattcataactggaaagcaaagagaagaacaagtatgatttggatgataaagcattgttttaatggtgaaaacttcacagatcactaatgtttctagaggttaacttcaagtgggcaagctggggtttttaggtagtcagtggcctagttcctaaagccacagtataggatctgttaaactgaatgtctgttgaaagtttgttttagctgcttggaggcttccttttaagacaaactgtatgtgattaagttgttttgagggaactgaagaacctgatgtagcccctggccagataactgcctgatttctcagatattatttctctgggaaacattctacatagcacaggagcttaagagtggcattatcttctcgccttaatttccagagattatttctgtactgagaatcctggaactactatgctaggaaatttaaagctgcatggtctgtcttgttttcatttaattattgtgaatacctagaatctttcttggtcctgatttctcttgcttaatccagtctttatctctaactgccccttatttgatcaccatgtactaggagctctgatagccagctcagctcctaatccttgaggcaacattctttttctatttgaacttcagttctgtccttgaatcccgactagatatttcttgccctctggtctcagaattctcttggcttttattccttgatccacttgccagttttatcactttacccttgttcctcatggcttcccatcaagccatgggtattaggtgacagtgtaatttattagattctggttttgcccaaatactgggcatgctttaataataactgaaccatttcattatttggataggcatgggtaccttatcaagcagattaaaaggatatggtacccgtcctttagaaaagaacagctaaaaccttgttgtggattatggatttagcctaaagaaaaataatctggcataaattaagagtaagagagaagattaatagaaatttcacttcacataacttaaaacatggctatttcaataaaggactaaagtttctcctggatcccagaattcaacctgtatttataaatgtataatgtatttagctactttttggtttaaatgaacttgttgggttagcttggtaaatgttataatttttactgttttctacaaagaaaatattttctaatttaagttggagctatctgtgcagcagtttctctacagttgtgcataaatgtttttactataaaatgagctaatgtataaaatactgctgtataccataataaagatagtaatacttgaaaaaaa

SEQ ID NO: 1559 - protein, 809 aa, Homo sapien
WTQGGELPLPLHAVEKTGRPGQPALKMPGKLRSDAGLESDTAMKKGETLRKQTEEKEKKEKPKSDKTEEIAEEEETVFPKAKQVKKKAEPSEVDMNSPKSKKAKKKEEPSQNDISPKTKSLRKKKEPIEKKVVSSKTKKVTKNEEPSEEEIDAPKPKKMKKEKEMNGETREKSPKLKNGFPHPEPDCNPSEAASEESNSEIEQEIPVEQKEGAFSNFPISEETIKLLKGRGVTFLFPIQAKTFHHVYSGKDLIAQARTGTGKTFSFAIPLIEKLHGELQDRKRGRAPQVLVLAPTRELANQVSKDFSDITKKLSVACFYGGTPYGGQFERMRNGIDILVGTPGRIKDHIQNGKLDLTKLKHVVLDEVDQMLDMGFADQVEEILSVAYKKDSEDNPQTLLFSATCPHWVFNVAKKYMKSTYEQVDLIGKKTQKTAITVEHLAIKCHWTQRAAVIGDVIRVYSGHQGRTIIFCETKKEAQELSQNSAIKQDAQSLHGDIPQKQREITLKGFRNGSFGVLVATNVAARGLDIPEVDLVIQSSPPKDVESYIHRSGRTGRAGRTGVCICFYQHKEEYQLVQVEQKAGIKFKRIGVPSATEIIKASSKDAIRLLDSVPPTAISHFKQSAEKLIEEKGAVEALAAALAHISGATSVDQRSLINSNVGFVTMILQCSIEMPNISYAWKELKEQLGEEIDSKVKGMVFLKGKLGVCFDVPTASVTEIQEKWHDSRRWQLSVATEQPELEGPREGYGGFRGQREGSRGFRGQRDGNRRFRGQREGSRGPRGQRSGGGNKSNRSQNKGQKRSFSKAFGQ

SEQ ID NO: 1560 - DNA, 1177 bp, Homo sapien
cgaacacgccgcggtcctcgtcgtggtgagcgcagccactcaggctggtcctgggggtggggctgtaggggaaagtgctaaagccgctgagtgaagtaagaactctgctagagaggaaatggctgcttcatcatcatcctcctcagctggtggggtcagtggaagttctgtcactggatctggtttcagtgtctcagaccttgccccaccacggaaagcccttttcacctaccccaaaggagctggagagatgttagaagatggctctgagagattcctctgcgaatctgtttttagctatcaagtggcatccacgcttaaacaggtgaaacatgatcagcaagttgctcggatggaaaaactagctggtttggtagaagagctggaggctgacgagtggcggtttaagcccatcgagcagctgctgggattcaccccctcttcaggttgatactgcctggatggtcacctctggtgcgcagcaagtgcaaagccagtgggggactttctcacagcttacatagccatccagagatccacagctacgtcactgaattgttaatgcacatttgtacttggtttctctgtatctattcacaggcaacaaatacttatatgtgtgatctttcagggaatgttttgtttatttgtttttaaaagtattgggaatcagattaagacaatcagtttcagagaaccaggaggtttggggttaagagatactcaaaaattttcacaagccaagtagggcatatatcagatttggccaactgaatggcgtctgtcctgtcatccatatggtgcctggaaatatttaccagtcaaggtcaaggtcagcatctgtggttaaaaatatagcattctgacctaaaaaagttattttgcagatgaatgtgttttcaactcaggacctatccaaatgaggaatttttaaatattcttttttttttcctatttttagacatcaattctatagattctgactttttctaacctcttatagacatgccaaatgctggcaaaaagaagtgctttttggatatggcagcacttgtaaaaataaagcagtaagcaaaatccttttaaacacagaaatcctgagttcttctcattggtggactcaagcaattctgtagcaaataaatcctttgaaagagctccaaaaaaaaaaaaaaaa

SEQ ID NO: 1561 - protein, 110 aa, Homo sapien
MAASSSSSSAGGVSGSSVTGSGFSVSDLAPPRKALFTYPKGAGEMLEDGSERFLCESVFSYQVASTLKQVKHDQQVARMEKLAGLVEELEADEWRFKPIEQLLGFTPSSG

SEQ ID NO: 1562 - DNA, 1613 bp, Homo sapien
agcgccgcgtggttagcgtcggcggcttttggcatggcgactttttctggcccggctgggccaatcctgtcgcttaatccgcaggaagatgtcgagtttcaaaaggaggtggcgcaggttcgcaagcgcataacccagcgaaaaaaacaagaacaacttactcctggagtagtctatgtgcgccacctacctaacctacttgacgaaacccagatcttttcatatttctcccagtttggcactgtgacacggttcaggctgtccagaagtaaaaggactggaaatagcaaaggctatgcatttgtggagtttgagtctgaggatgttgccaaaatagttgctgaaacaatgaacaactacctgtttggtgaaagactcttggagtgtcattttatgccacctgaaaaagtacataaagaactctttaaagactggaatattccatttaagcagccatcatatccatcagtgaaacggtataatcggaatcggacactaacacaaaagctacggatggaggagcgatttaaaaagaaagaaagattactcaggaagaaattagctaaaaaaggaattgactatgattttccttctttgattttacagaaaacggaaagtatttcaaaaactaatcgtcagacgtctacaaaaggccaggttttacgtaagaagaagaaaaaagtttcaggtactcttgacactcctgagaagactgtggatagccagggccccacaccagtttgtacaccaacatttttggagaggcgaaaatctcaagtggctgaactgaatgatgatgataaagatgatgaaatagttttcaaacagcccatatcctgtgtaaaagaagaaatacaagagactcaaacacctacacattcacggaaaaaaagacgaagaagcagcaatcagtgattttcaatgtattatatttcttttgaaaaatataatatttttatgagagtggactttgtatttcactaggtacaatggaatacaacctttgacaagattttcagaggaaaaatacactgtttggtcaagttaaggaaagcagtgtgtaattttggattgcctgcccttggctgaaatacaggggtgcataccatcttgcagtggcttggctgacattgcctctctgtcctggcctctagttttcttttgatatttcatagctctccttagtttactctgcctggatagaaagttgaccactaactgcaggtttaagtactaaactgcagccttttctgtcgccagcaattaaagaccaccaatcttgtttgtccatctacatggtttgtcggggacatttaactcatggaggtgctttagatttcaacatcagatggttgaagctggaagtttaattatatgtagagtgagaaggcagttccagttttagcacagatttgtttatgtgttcagattttaatagagattcaaaaatgactcatttttaccaataatgttaaattagttttggttgtgctagcatgaattaataaccaccattttataccagtatcatcagtgaagaattgtatttcaagattcaaacaataaccagcaattaaacttttttctacaatgtaaaaaaaaaaaaaaaaaaa

SEQ ID NO: 1563 - protein, 293 aa, Homo sapien
MATFSGPAGPILSLNPQEDVEFQKEVAQVRKRITQRKKQEQLTPGVVYVRHLPNLLDETQIFSYFSQFGTVTRFRLSRSKRTGNSKGYAFVEFESEDVAKIVAETMNNYLFGERLLECHFMPPEKVHKELFKDWNIPFKQPSYPSVKRYNRNRTLTQKLRMEERFKKKERLLRKKLAKKGIDYDFPSLILQKTESISKTNRQTSTKGQVLRKKKKKVSGTLDTPEKTVDSQGPTPVCTPTFLERRKSQVAELNDDDKDDEIVFKQPISCVKEEIQETQTPTHSRKKRRRSSNQ

SEQ ID NO: 1564 - DNA, 1691 bp, Homo sapien
agcgggtttgcgggagcgccgcgtggttagcgtcggcggcttttggcatggcgactttttctggcccggctgggccaatcctgtcgcttaatccgcaggaagatgtcgagtttcaaaaggaggtggcgcaggttcgcaagcgcataacccagcgaaaaaaacaagaacaacttactcctggagtagtctatgtgcgccacctacctaacctacttgacgaaacccagatcttttcatatttctcccagtttggcactgtgacacggttcaggctgtccagaagtaaaaggactggaaatagcaaaggctatgcatttgtggagtttgagtctgaggatgttgccaaaatagttgctgaaacaatgaacaactacctgtttggtgaaagactcttggagtgtcattttatgccacctgaaaaagtacataaagaactctttaaagactggaatattccatttaagcagccatcatatcaatcagtgaaacggtataatcggaatcggacactaacacaaaagctacggatggaggagcgatttaaaaagaaagaaagattactcaggaagaaattagctaaaaaaggaattgactatgattttccttctttgattttacagaaaacggaaagtatttcaaaaactaatcgtcagacgtctacaaaaggccaggttttacgtaagaagaagaaaaaagtttcaggtactcttgacactcctgagaagactgtggatagccagggccccacaccagtttgtacaccaacatttttggagaggcgaaaatctcaagtggctgaactgaatgatgatgataaagatgatgaaatagttttcaaacagcccatatcctgtgtaaaagaagaaatacaagagactcaaacacctacacattcacggaaaaaaagacgaagaagcagcaatcagtgattttcaatgtattatatttcttttgaaaaatataatatttttatgagagtggactttgtatttcactaggtacaatggaatacaacctttgacaagattttcagaggaaaaatacactgtttggtcaagttaaggaaagcagtgtgtaattttggattgcctgcccttggctgaaatacaggggtgcataccatcttgcagtggcttggctgacattgcctctttgtcctggcctctagttttcttttgatatttcatagctctccttagtttactctgcctggatagaaagttgaccactaactgcaggtttaagtactaaactgcagccttttctgtcgccagcaattaaagaccaccaatcttgtttgtccatctacatggtttgtcggggacatttaactcatggaggtgctttagatttcaacatcagatggttgaagctggaagtttaattatatgtagagtgagaaggcagttccagttttagcacagatttgtttatgtgttcagattttaatagagattcaaaaatgactcatttttaccaataatgttaaattagttttggttgtgctagcatgaattaataaccaccattttataccagtatcatcagtgaagaattgtatttcaagattcaaacaataaccagcaattaaacttttttctacaatgtatttgtttgcgagtaggacttgggagtcattggaaaaaaaaaataataaattttccccttcattaacaaaaaaaaaaaaaaaa

SEQ ID NO: 1565 - protein, 293 aa, Homo sapien
MATFSGPAGPILSLNPQEDVEFQKEVAQVRKRITQRKKQEQLTPGVVYVRHLPNLLDETQIFSYFSQFGTVTRFRLSRSKRTGNSKGYAFVEFESEDVAKIVAETMNNYLFGERLLECHFMPPEKVHKELFKDWNIPFKQPSYQSVKRYNRNRTLTQKLRMEERFKKKERLLRKKLAKKGIDYDFPSLILQKTESISKTNRQTSTKGQVLRKKKKKVSGTLDTPEKTVDSQGPTPVCTPTFLERRKSQVAELNDDDKDDEIVFKQPISCVKEEIQETQTPTHSRKKRRRSSNQ

SEQ ID NO: 1566 - DNA, 880 bp, Homo sapien
  Unsure 7: Unknown base
  Unsure 19: Unknown base
  Unsure 22: Unknown base
  Unsure 27: Unknown base
  Unsure 33: Unknown base
  Unsure 38: Unknown base
  Unsure 47: Unknown base
attgaanttaggtgacccnatngaagngctatnacgtngcatgcacngcgtacgtaagctcggaattcggctcgagaaaaaaaaaagtgccagcgtatgaggtaattagattggttctctccagaggtaacctgccaagaagagatgctatagatgttactcctatactgtaaaacattgtgaaatcagattactttaaaatgatgtattacaaagttatgcaaaaaagcagttgtgactatggaagcccaaggcttatatcccagctctgtcttacactaaatatgggtacagtgtttccactctgtccataaaatgggagctaatattctccaacctgtgtgcctgacatgatggttaaagggattaaacaaaacaatagtttgtaatttattctgtcagagcaaactgctggtaaataaaagggactaagttgacgaaaaataaattttaaaaaacctaataaaacaagtttgtaatttataattgtatacaaataaaagatgttacaaaaattgcgcacttatatgtatgtaccatgacataactaattcgttgaacaagttgtgagacaatcctttctgagaaaaggtagacctgttacatcgtctgtgggttagggtcatgtcagcacgtaccaggtacattctagcttttgtagagaaagtaaaatctagtgttgagtatgtaggcactgagccaggtggcctgcttaacataaaaggactgatttcagggtggctgtgggagcctttctaatgctctaattctctagccccttgcctgatccagctgattccaagagccaagattttagtctttcttggttggcttttttaaatgctttgggctttcctttaatgtatcttcaaaatcattc

SEQ ID NO: 1567 - protein, 32 aa, Homo sapien
  unsure 2: unknown amino acid
  unsure 7: unknown amino acid
  unsure 9: unknown amino acid
  unsure 11: unknown amino acid
  unsure 13: unknown amino acid
  unsure 16: unknown amino acid
LXLGDPXEXLXRXMHXVRKLGIRLEKKKSASV

SEQ ID NO: 1568 - DNA, 2126 bp, Homo sapien
ggcgctccgcctgctgcgcgtctacgcggtccccgcgggccttccgggcccactgcgccgcgcggaccgcctcgggctcggacggccggtgtccccggcgcgccgctcgcccggatcggccgcggcttcggcgcctggggctcggggctccggggaggccgtcgcccgcgatgctgctctccaagttcggctccctggcgcacctctgcgggcccggcggcgtggaccacctcccggtgaagatcctgcagccagccaaggcggacaaggagagcttcgagaaggcgtaccaggtgggcgccgtgctgggtagcggcggcttcggcacggtctacgcgggtagccgcatcgccgacgggctcccggtggctgtgaagcacgtggtgaaggagcgggtgaccgagtggggcagcctgggcggcgcgaccgtgcccctggaggtggtgctgctgcgcaaggtgggcgcggcgggcggcgcgcgcggcgtcatccgcctgctggactggttcgagcggcccgacggcttcctgctggtgctggagcggcccgagccggcgcaggacctcttcgactttatcacggagcgcggcgccctggacgagccgctggcgcgccgcttcttcgcgcaggtgctggccgccgtgcgccactgccacagctgcggggtcgtgcaccgcgacattaaggacgaaaatctgcttgtggacctgcgctccggagagctcaagctcatcgacttcggttcgggtgcgctgctcaaggacacggtctacaccgacttcgacggcacccgagtgtacagccccccggagtggatccgctaccaccgctaccacgggcgctcggccaccgtgtggtcgctgggcgtgcttctctacgatatggtgtgtggggacatccccttcgagcaggacgaggagatcctccgaggccgcctgctcttccggaggagggtctctccagagtgccagcagctgatccggtggtgcctgtccctgcggccctcagagcggccgtcgctggatcagattgcggcccatccctggatgctgggggctgacgggggcgccccggagagctgtgacctgcggctgtgcaccctcgaccctgatgacgtggccagcaccacgtccagcagcgagagcttgtgaggagctgcacctgactgggagctaggggaccacctgccttggccagacctgggacgcccccagaccctgactttttcctgcgtgggccgtctcctcctgcggaagcagtgacctctgacccctggtgaccttcgctttgagtgccttttgaacgctggtcccgcgggacttggttttctcaagctctgtctgtccaaagacgctccggtcgaggtcccgcctgccctgggtggatacttgaaccccagacgcccctctgtgctgctgtgtccggaggcggccttcccatctgcctgcccacccggagctctttccgccggcgcagggtcccaagcccacctcccgccctcagtcctgcggtgtgcgtctgggcacgtcctgcacacacaatgcaagtcctggcytccgcgcccgcccgcccacgcgagccgtacccgccgccaactctgttatttatggtgtgaccccctggaggtgccctcggcccaccggggctatttattgtttaatttatttgttgaggttatttcctctgagcagtctgcctctcccaagccccaggggacagtggggaggcaggggagggggtggctgtggtccagggaccccaggccctgattcctgtgcctggcgtctgtcctggccccgcctgtcagaagatgaacatgtatagtggctaacttaaggggagtgggtgaccctgacacttccaggcactgtgcccagggtttgggttttaaattattgactttgtacagtctgcttgtgggctctgaaagctggggtggggccagagcctgagcgtttaatttattcagtacctgtgtttgtgtgaatgcggtgtgtgcaggcatcgcagatgggggttctttcagttcaaaagtgagatgtctggagatcatatttttttatacaggtatttcaattaaaatgtttttgtacatagaaaaaaaaaaaaaaaaaaaaaaagggcgg

SEQ ID NO: 1569 - protein, 382 aa, Homo sapien
RSACCASTRSPRAFRAHCAARTASGSDGRCPRRAARPDRPRLRRLGLGAPGRPSPAMLLSKFGSLAHLCGPGGVDHLPVKILQPAKADKESFEKAYQVGAVLGSGGFGTVYAGSRIADGLPVAVKHVVKERVTEWGSLGGATVPLEVVLLRKVGAAGGARGVIRLLDWFERPDGFLLVLERPEPAQDLFDFITERGALDEPLARRFFAQVLAAVRHCHSCGVVHRDIKDENLLVDLRSGELKLIDFGSGALLKDTVYTDFDGTRVYSPPEWIRYHRYHGRSATVWSLGVLLYDMVCGDIPFEQDEEILRGRLLFRRRVSPECQQLIRWCLSLRPSERPSLDQIAAHPWMLGADGGAPESCDLRLCTLDPDDVASTTSSSESL

SEQ ID NO: 1570 - DNA, 4415 bp, Homo sapien
gaccgcggctgcaggaacggaggcggaaggggccctgcggcgacgacgtcgtcgacgggggtggccgtgggagctgagcacggagaagactccctctctcggaagccggatcccgagccgggcaggatggatcaccaccagccggggactgggcgctaccaggtgcttcttaatgaagaggataactcagaatcatcggctatagagcagccacctacttcaaacccagcaccgcagattgtgcaggctgtgtcttcagcaccagcacttgaaactgactcttcccctccaccatatagtagtattactgtggaagtacctacaacttcagatacagaagtttacggtgagttttatcccgtgccacctccctatagcgttgctacctctcttcctacatacgatgaagctgagaaggctaaagctgctgcaatggcagctgcagcagcagaaacatctcaaagaattcaggaggaagagtgtccaccaagagatgacttcagtgatgcagaccagctcagagtggggaatgatggcattttcatgctggcatttttcatggcatttattttcaactggcttggattttgtttatccttctgtatcaccaataccatagctggaaggtatggtgctatctgcggatttggcctttccttgatcaaatggatccttattgtcaggttttctgattattttactggatatttcaatggacagtattggctttggtggatatttcttgtacttggcctgctccttttcttcagaggatttgttaattatctaaaagtcagaaacatgtctgaaagtatggcagctgctcatagaacaaggtatttcttcttattgtagagactgcatcaacccgacattcctttcttataccaatgtgaaatttccagatcatctgtaaacctacaactttaatagaagactactaataacagaagacaaattagtgaagaaaagacggagtttcgaaattgaatggcagggtggtttttgcttacaagccatttctgttcattctttaagtatctatatttcatttgttttgcacatatgcatatgtgcccatttaagatatttgcatatacttgatagaaaccataaagttgtagcagttaagtccagtcacatttggttaatcagtgtttgatataattgaaagagttgagtggataaacagtcttccagcttgtaaatgccattgacttctgacctgacatttagtataataaaaatgaaattcttaaccatgtcaaatgatttagtttctggctcttagactcatctggcagttctacacatgaaacatcttttgttatataaggtgtattgaaacctgcagtgctgattattagaaaggatttgtcggatttttgaacatgatatttacattattatttaggaaaactcttcctgtaaataaccatgcataacttactttctgcaatgttttcttagaaattgtgtccagatagctttcactaattttaaattaagtgaactaaatatatatgtgtatatgtatacacatatatatacacacacacatatatatatttagaaacgtgagtgttaaagatagaatttgttttaggacaaattttaagaaaatgtgggaataccaaatgtcctttataagaaaaataaattttgttttaagggacataccagttttagggattttcagatgggaagctgcatttttaggattgcccatcttaagagatcttgcaggaagagattgtattagatattatatttatttcatttaagataattttcaaagttaattttctaaataagataattctcatttgtgtttgtcttttaaaaggccaataaaatatctttcagtatcattgtaataattttttagagtttaatttgtaaagcttagcaaataaaatcttgtactatgaatagcttcttgctttatgactttaggattaacttgtaaaaaacatatcctgaactgagatatgcaaaatactcattttcaagttatggaaatgtgtttgtggcatataggactgtggggtctgtgtgtgtagtgagagtgtgtagccactattataactggaatttaatttacattcataaactactatatttcccatcttgcaaatcattttatgtctcatctgtttttcctttcggttatatctttggttttgaataccaacatttaaaatgatggtattttatcttttaaacttaaaaattatttaatacagctatatggaccttataaaattgatttcttatttattattagacattactactaaaaggtacatctaactattcagggacatttttccatttccaaaaaataaaatttattatgctttataacctcttctgtattttctaattttttcattgtctttgataaataaaacagttttgttttgctaatatagcctattttttgttttgtctcattcagtttactttcctgcgtagaatttttattgttatattaaaatttttattgttgtattaaagtacctgtgttacaccccttgaagtaagacagtagcatggggtaaagaaaaaatatttagtttagttgcctaatttggaagttaattaaaattaaactgtactaataacatattcaaactcatgctggatctctttcatattaatttcttatagacctgtactttattctttcaataatttttaaatgaaattaagctttgctacatggtaattaaataattactaggaagcttagctatcaaacatcgacttactaaaatttcattttagcttttatggtatatgtgcttgttttctgaatatggatacatgttacttttgatccagcatcaaaacttcactttttgttttgacttttccccccaaatctgtaaggttcaagtatacatattactgaatcctctataattggcataattcaatggtagccttaaatctcatcatgtaagcaggggaatcagaatgttattttcaagaacttaatgttcccttcagatatataaaatcctgcatacttcatttcctgtgagcttgaacagctgctgttgtgttttggggatgcttgatcatctttgcactctgccttaaagattgaaaaatcaaaactcttgttagggtatctaaacatttttgagtgtgaactggggattggaagttaatacaaaaaaatttcaaattatttctattgtaaatgaataagctagtcatggctaggataatccattttcatgtatttatgcaataaactgaattttaaggcaaaaacaacacttttctatatagtgtatgcaggacagattttagaaacttagattaaaatacaaatcccattacatttggttaaaatgaatctctgcttaatggaaaaaatactaatctttagcctattttgagtctataagatatatttcattttagacatgccttctaagttgttcacagatttttacctgctaaaacaatattatttccagtaaaacctctcctaacaggaaaagtggagttcaaaatatccaattggagaaaaattcagagttccttcattaaatataatttttttcatctagtatgtactatttcaagaagtgcaaaaagtaatgatagtgaatgtgataccatacttaactaaggtaatatatatccttagtttgctcaaaagagtcctggttattcctgttttctcagcttaatagtgcctcatcgtactctcaaaagtgttctaatttggaggataagttatatgatcatcctgtgtataattgtagactgtaccaagaagcaactaccttagctccactgccctttgagggatggaactggggtaagggcaggagccagttattattgccacagtgttttctaatgaaccatttggcctgtagaagaggaatagtattttttttaatagttgtatttgaatgattccagcttatcgtaaatactaaactgaatggcttttatatttttaactgctgttaaatgttattttagcatttattagttgtttattatttaattcttcaaatagtcatatgaaaacatatatttgataaaggtcaattgttagatgataatgtgccattcattatcataggaatgtccttgcccatatataaaacatgctggcatgtattttacttgttaataaagttgtatagatgtggaagtgtgaacctgtgatgcatccttttcaaaatcagtttaagattcgcatattatcatgactgtgacctcactaaactgtttatgtgacaaacctttcaagattggagatgaaaacaacacttgtgaaattaggttggggttgcaacatcttttaacttctcagttatttgtatgtcaggaaacagattgtggtttaattttaataaacaaaatatcatctttttgaaaat

SEQ ID NO: 1571 - protein, 284 aa, Homo sapien
DRGCRNGGGRGPAATTSSTGVAVGAEHGEDSLSRKPDPEPGRMDHHQPGTGRYQVLLNEEDNSESSAIEQPPTSNPAPQIVQAVSSAPALETDSSPPPYSSITVEVPTTSDTEVYGEFYPVPPPYSVATSLPTYDEAEKAKAAAMAAAAAETSQRIQEEECPPRDDFSDADQLRVGNDGIFMLAFFMAFIFNWLGFCLSFCITNTIAGRYGAICGFGLSLIKWILIVRFSDYFTGYFNGQYWLWWIFLVLGLLLFFRGFVNYLKVRNMSESMAAAHRTRYFFLL

SEQ ID NO: 1572 - DNA, 8570 bp, Homo sapien
gccttataagtggtttagtgctcagttggctctagtaaccagaggacacagaaagtatcttttggaaagtttagccacctgtgctttctgactcagagtgcatgcaacagttagatcatgcaacagttagattatgtttagggttaggattttcaaagaatggaggttgctgcactcagaaaataattcagatcatgtttatgcattattaagttgtactgaattctttgcagcttaatgtgatatatgactatcttgaacaagagaaaaaactaggagatgtttctcctgaagagcttttggggttgggaactattcttttttaattgctgtactacttaacattgttctaattcagtagcttgaggaacaggaacattgttttctagagcaagataataaaggagatgggccatacaaatgttttctactttcgttgtgacaacattgattaggtgttgtcagtactataaatgcttgagatataatgaatccacagcattcaaggtcaggtctactcaaagtctcacatggaaaagtgagttctgcctttcctttgatcgagggtcaaaatacaaagacatttttgctagggcctacaaattgaatttaaaaactcactgcactgattcatctgagcttttggttagtattcatggctagagtgaacatagctttagtttttgctgtgtaaaagtgttttcataagttcactcaagaaaaatgcagctgttctgaactggaatttttcagcattctttagaattttaaatgagtagagagctcaacttttattcctagcatctgcttttgactcatttctaggcagtgcttatgaagaaaaattaaagcacaaacattctggcattcaatcgttggcagattatcttctgatgacacagaatgaaagggcatctcagcctctctgaacttgtaaaaatctgtccccagttcttccatcggtgtagttgttgcatttgagtgaatactctcttgatttatgtattttatgtccagattcgccatttctgaaatccagatccaacacaagcagtcttgccgttagggcattttgaagcagatagtagagtaagaacttagtgactacagcttattcttctgtaacatatggtttcaaacatctttgccaaaagctaagcagtggtgaagtgaaaagggcatattgccccaaggttacactgaagcagctcatagcaagttaaaatattgtgacagatttgaaatcatgtttgaatttcatagtaggaccagtacaagaatgtccctgctagtttctgtttgatgtttggttctggcggctcaggcattttgggaactgttgcacagggtggagtcaaaacaacctacatataaaaagagaaaaagagaaacttgtccatttagctttcataagaaatcccatggcaaagggtaataaaaaggacctaatcttaaaaatacaatttctaagcacttgtaagaacccagtgggttggagcctcccactttgtccctcctttgaagtggatgggaactcaaggtgcaaagaacctgttttggaagaaagcttggggccatttcagccccctgtattctcatgattttctctcaggaagcacacactgtgaatggcagacttttcatttagccccaggtgacttactaaaaatagttgaaaattattcacctaagaatagaatctcagcattgtgttaaataaaaatgaaagctttagaaggcatgagatgttcctatcttaaataaagcatgtttcttttctatagagaaatgtatagtttgactctccagaatgtactatccatcttgatgagaaaactcttaaatagtaccaaacattttgaactttaaattatgtatttaaagtgagtgtttaagaaactgtagctgcttcttttacaagtggtgcctattaaagtcagtaatggccattattgttccattgtggaaattaaattatgtaagcttcctaatatcataaacatattaaaattcttctaaaatattgcttttcttttaagtgacaatttgactattcttatgataagcacatgagagtgtcttacattttccaaaagcaggctttaattgcatagttgagtctaggaaaaaataatgttaaaagtgaatatgccaccataattacttaattatgttagtatagaaactacagaatatttaccctggaaagaaaatattggaatgttattataaactcttagatatttatataattcaaaagaatgcatgtttcacattgtgacagataaagatgtatgatttctaaggctttaaaaattattcataaaacagtgggcaatagataaaggaaattctggagaaaatgaaggtatttaaagggtagtttcaaagctatatatattttgaaggatatattctttatgaacaaatatattgtaaaaatttatactaaggtcatctggtaactgtgggattaatatggtcgaaaacaaatgttatggagaagctgtcccaagcaaactaaattacctgtacttttttcccatttcaagggaagaggcaaccacatgaagcaatacttcttacacatgcctaagaacgttcattgaaaaaataaatttttaaaaggcatgtgtttcctatgccaccaatacttttgaaaaattgtgaaccttacccaaaaccatttatcatgtccattaagtatatttgggtatataattaggaagatatttacatgttccatctccacagtggaaaaacttattgaggctaccaaagtgtgccaagaaatgtaagtccttagagtaattagaaatgctgttttcctcaaaagcatgagaaactagcattttcatttcttatttactccctttctatatcaatgcaattcacaacccaattttaatacatccctatatctcaagcatttctatcttgtactttttcagaaaataaaccaaaaataatccttggtctctctatcttctgaccttgtaagcaacagaaatgtaaaaacagaaggggtccaatttttacacgtttttttctcaagtagcctttctggggatttttattttcttaatgaagtgccaatcagcttttcaaaatgttttctatttctcagcatttccaggaagtgataacgtttagctaaatgagtagaagtggacttccttcaacatattgttaccttgtctagccttaggaagaaaacaagagccacctgaaaataaatacaggctcttttcgagcatctgctgaaatactgttacagcaatttgaagttgatgtggtaggaaaggaaggtgacttttcttgcaaaagtctttctaaacattcacactgtcctaagagatgagctttcttgttttattccggtatattccacaaggtggcacttttagagaaaaacaaatctgatgaagactaaagaggtacttctaaaagagatttcattctaactttatttttctgcgcatatttaactctttcctagcacttgttttttgggatgattaatagtctctataatgttctgtaacttcaatattttacttgttacctaggttctgaacaattgtctgcaaataaattgttcttaaggatggataatacacccattttgatcatttaagtaaagaaagcctagtcattcattcagtcaagaaaaaatttttgaagtacccagttaccttacttttctagattaaaacaggcttagttactaaaaaggcagtcctcatctgtgaacaggatagtttcgttagaagtataaaactcctttagtggccccagttaaaacacacataccctctctgctgctttcaaattccctagcatggtggcctttcaacattgattaaattttaaaatcctaatttaaagatcaggtgagcaaaatgagtagcacatcagtaattcagtagacaaaacttttgtctgaaaaattgctgtattgaaacagagccctaaaataccaaaagaccaggtaattttaacatttgtggaatcacaaatgtaaattcataagaagctctaattaaaaaaaaaaagtctgaagtatatgagcataacaacttaggagtgtgtctacatacttaacttttgaagttttttggcaactttatatactttttttaaatttacaagtctacttaaagacttcttataccccaaatgattaagttaattttagaggtcacctttctcacagcagtgtcacttgaaatttagtagggaaggatattgcagtatttttcagtttccttagcacagcaccacagaaagcagcttattccttttgagtggcagacactcgacggtgcctgcccaactttcctcctgagtggcaagcagatgagtctcagtaattcatactgaaccaaaatgccacatacactaggggcagtcagaaactggctgagaaatcccccgcctcattcgcccctctgctcccaggaactagagtccagttaaagcccctatgcgaaaggccgaattccaccccagggtttgttataacagtggccagtctgaaccccatttgctcgtgctcaaaacttgattcccacttgaaagccttccgggcgcgctgcctcgttgccccgcccctttggcaggagagaggcagtgggcgaggccgggctggggccccgcctcccactcacctgccggtgcctgaaattatgtgcggccccgcgggctgctttccgaggtcagagtgccctgctgctgtctcagaggcatctgttctgcaaatcttaggaagaaaaatgtccctagtagcaaacgggtgtcttctgtgcataaataagtacaacacaattctccgaaagttcgggtaaaaagagatgcggtagcagctgccctgtgtgaagctgtctaccccgcatctctcaggcgctaagctcagtttttgtttttgtttttgtttttttaaagaaaagatgtataattgcaggaatttttttttatttttttattttccatcattctatatatgtgatggtgaaagatatgcctggaaaagttttgttttgaaaagtttattttctgcttcgtcttcagttggcaaaagctctcaattctttagcttccagtttcttttctctctttttctttgttaggtaattaaaggtatgtaaacaaattatctcatgtagcaggggattttcatgttgagaggaatcttccgtgtgagttgtttggtcacacaaataaccctttctcaattttaggagtttggattgtcaaatgtaggtttttctcaaagggggcatataactacatattgactgccaagaactatgactgtagcactaatcagcacacatagagccacacaattatttaatttctaactctctgtggtccctagaaaaattccgttgatgtgcttaggttaaagttctgaagatacccgttgtacccttacttgaaagtttctaatcttaagttttatgaaatgcaataatatgtatcagctagcaatatttctgtgatcaccaacaactctcagtttgatcttaaagtctgaataataaaacaaatcccagcagtaatacatttcttaaacctcacagtgcatgatatatcttttcattctgatcctgtgtttgcaaaaatatacacatgtatatcatagttcctcactttttattcatttgttttcctattacctgtagtaaatatattagttagtacatggaatttatagcatcagctacccccaggaacagcacctgacaggcgggggattttttttcaagttgttctacatttgcataaattatttctattattattcatgtatgttatttatttctgaatcacactagtcctgtgaaagtacaactgaaggcagaaagtgttaggattttgcatctaatgttcattatcatggtattgatggacctaagaaaataaaaattagactaagcccccaaataagctgcatgcatttgtaacatgattagtagatttgaatatatagatgtagtattttgggtatctaggtgttttatcattatgtaaaggaattaaagtaaaggactttgtagttgtttttattaaatatgcatatagtagagtgcaaaaatatagcaaaaataaaaactaaaggtagaaaagcattttagatatgccttaatttagaaactgtgccaggtggccctcggaatagatgccaggcagagaccagtgcctgggtggtgcctcctcttgtctgccctcatgaagaagcttccctcacgtgatgtagtgccctcgtaggtgtcatgtggagtagtgggaacaggcagtactgttgagaggagagcagtgtgagagtttttctgtagaagcagaactgtcagcttgtgccttgaggcttccagaacgtgtcagatggagaagtccaagtttccatgcttcaggcaacttagctgtgtacagaagcaatccagtgtggtaataaaaagcaaggattgcctgtataatttattataaaataaaagggattttaacaaccaacaattcccaacacctcaaaagcttgttgcattttttggtatttgaggtttttatctgaaggttaaagggcaagtgtttggtatagaagagcagtatgtgttaagaaaagaaaaatattggttcgcgtagagtgcaaattagaactagaaagttttatacgattatcattttgagatgtgttaaagtaggttttcactgtaaaatgtattagtgtttctgcattgccatagggcctggttaaaactttctcttaggtttcaggaagactgtcacatacagtaagcttttttccttctgacttataatagaaaatgttttgaaagtaaaaaaaaaaaaatctaatttggaaatttgacttgttagtttctgtgtttgaaatcatggttctagaaatgtagaaattgtgtatatcagatactcatctaggctgtgtgaaccagcccaagatgaccaacatccccacacctctacatctctgtcccctgtatctcttcctttctaccactaaagtgttccctgctaccatcctggcttgtccacatggtgctctccatcttcctccacatcatggaccacaggtgtgcctgtctaggcctggccaccactcccaacttgacctagccacattcatctagagatggttcctgatgctgggcacagactgtgctcatggcacccattagaaatgcctctagcatctttgtatgcatcttgatttttaaaccaagtcattgtacagagcattcagttttggctgtggtaccaagagaaaaactaatcaagaatataaaccacattccaggctgctgttttctctccatctacaggccacacttttactgtatttcttcatacttgaaattcattctgctattttcatatcagggtacagacttataagggtgcatgttccttaaaggtgcataattattcttattccgtttgcttatattgctacagaatgctctgttttggtgctttgagttctgcagacccaagaagcagtgtggaaattcactgcctgggacacagtcttataagaatgttggcaggtgactttgtatcagatgttgcttctcttttctctgtacacagattgagagttaccacagtggcctgtcgggtccaccctgtgggtgcagcacagctctctgaaagcaagaaccttcctacctattctaacgtttttgccctctaagaaaaatggcctcaggtatggtatagacatagcaagaggggaagggctgtctcactctagcaaccatccctccattacacacagaaagccctcttgaagcaaaagaagaagaaagaaagaaagcttatctctaaggctactgtcttcagaatgctctgagctgaatgctcttgctcctttcccaagaggcagatgaaaatatagccagtttatctatacccttcctatctgaggaggagaatagaaaagtagggtaaatatgtaacgtaaaatatgtcattcaaggaccaccaaaactttaagtaccctatcattaaaaatctggttttaaaagtagctcaagtaagggatgctttgtgacccagggtttctgaagtcagatagccattcttacctgccccttactctgacttattgggaaagggagaactgcagtggtgtttctgttgcagtggcaaaggtaacatgtcagaaaattcagagggttgcataccaataatcctttggaaactggatgtcttactgggtgctagaatgaaaatgtaggtatttattgtcagatgatgaagttcattgtttttttcaaaattggtgttgaaatatcactgtccaatgtgttcacttatgtgaaagctaaattgaatgaggcaaaaagagcaaatagtttgtatatttgtaataccttttgtatttcttacaataaaaatattggtagcaaataaaaataataaaaacaataactttaaactgctttctggagatgaattactctcctggctattttcttttttactttaatgtaaaatgagtataactgtagtgagtaaaattcattaaattccaagttttagcagaaaaa

SEQ ID NO: 1573 - protein, 29 aa, Homo sapien
PYKWFSAQLALVTRGHRKYLLESLATCAF

SEQ ID NO: 1574 - DNA, 1676 bp, Homo sapien
gctcgccggtcctcggcacgccgcccgttcgcccctgcgctgtccgcccttcccctagcgttacttccggtccctcgctgagggggttcgtgcggctcccaggaggcgtgaaccgcggaccatgagcgtgggcttcatcggggccggccagctggcctatgctctggcgcggggcttcacggccgcaggcatcctgtcggctcacaagataatagccagctccccagaaatgaacctgcccacggtgtccgcgctcaggaagatgggtgtgaacctgacacgcagcaacaaggagacggtgaagcacagcgacgtcctgtttctggctgtgaagccacatatcatccccttcatcctggatgagattggggccgacgtgcaagccagacacatcgtggtctcctgtgcggctggtgtcaccatcagctctgtggagaagaagctgatggcattccagccagcccccaaagtgattcgctgcatgaccaacacacctgtggtagtgcaggaaggcgctacagtgtacgccacgggcacccatgccctggtggaggatgggcagctcctggagcagctcatgagcagcgtgggcttctgcactgaggtggaagaggacctcatcgatgccgtcacggggctcagtggcagcgggcctgcctatgcattcatggctctggacgcattggctgatggtggggtgaagatgggtttgccacggcgcctggcaatccaactcggggcccaggctttgctgggagctgccaagatgctgctggactcggagcagcatccatgccagcttaaggacaatgtctgctcccctgggggagccaccatccacgccctgcactttctagagagtgggggcttccgctctctgctcatcaatgcagttgaggcctcctgtatccgaacacgagagctacagtccatggccgaccaagaaaagatctccccagctgcccttaagaagaccctcttagacagagtgaagctggaatcccccacagtctccacactgaccccctccagcccagggaagctcctcacaagaagcctggccctgggaggcaagaaggactaaggcagcatctgtcccctctgtgattcagagcccttagttgagagcccctgccgcccctgccacccccctgccccgctcccaccattgcccctcctcagctgtgcaaggagaaagcatgcttaggaagttttcaggtccttgtgataaaacctccttaaatctgttcagaccaagcaatgcgagcttcctctcctgtcccatgttggaagttgctctgaaggggtggtagatgctggaagccagacacaaccctgcgtacgctgctcagttggtggagactggggctgggactggagtcagcccagctgggaggaggggctggggaggatctgcagctgaagcccgaggcagggttggtgtgatgccaaggcaaagtggtgaggagaaaacaggaaacgggctttctctgaattggtaaatgggaaagaagtgagcaacttaagattgtcacaattaatcacaagtgtacaggattagactgggtttatatttaactcttgcttcataggtgtaccatttaaagagtgttatttaatgctaagtttaactgctttaataaagtttatttttaaatatcaaaaaaaaaaaaaaa

SEQ ID NO: 1575 - protein, 320 aa, Homo sapien
MSVGFIGAGQLAYALARGFTAAGILSAHKIIASSPEMNLPTVSALRKMGVNLTRSNKETVKHSDVLFLAVKPHIIPFILDEIGADVQARHIVVSCAAGVTISSVEKKLMAFQPAPKVIRCMTNTPVVVQEGATVYATGTHALVEDGQLLEQLMSSVGFCTEVEEDLIDAVTGLSGSGPAYAFMALDALADGGVKMGLPRRLAIQLGAQALLGAAKMLLDSEQHPCQLKDNVCSPGGATIHALHFLESGGFRSLLINAVEASCIRTRELQSMADQEKISPAALKKTLLDRVKLESPTVSTLTPSSPGKLLTRSLALGGKKD

SEQ ID NO: 1576 - DNA, 792 bp, Homo sapien
ggagttgcgcgggctgacgcgccactatgtagcgggtttcgggcgggccacgcgtgcgggacaggaacccaaccccagccgaccttgagctccaggagttcgtctcttacgtctgcggaagtgcagctgcctcagttcttagcgcaggttgacaactacaggcacaagccattgaagctggaatgtcctgttgctggtatttcaattgacttaagccaactatcccttcagttacaataggaaagtgcctctaataaggccaaatatgcgtactaacttgtagcaaccacgtgtccgtgcagtgccacaggagctagagcagtgacaatgctggtggcaacagggcagtgtagcaggtgcttcatgttcaccttttcaaccttttcatttaattgtcacaactcggaggtggattctgttagggacaggctgccccaggaccactccgcccccgctaactcaatgcagctgacccttaccctgaatactctgcagctgcattcctgaaccgttatctaggcgctatagcaaggtcaccagacttgctacaccgaagccctctgggtggcacgggggaggtcatgagaaacgtggattacacccccttgtaaattcctattttcacaagataatatattgtaagccggtcatgagattatatgtggtaaagttaattgactaacaaccccagggtctctctcccccatataaacccctcattttgtaagctcagggctgccacctccgactggtggagaagcctggcaggttaataaacttacttggcctgac

SEQ ID NO: 1577 - DNA, 2192 bp, Homo sapien
ggggcggagagaggcgagcaccgggaaggggagcgtggggccgctggaatgggtgaatttaaggtccatcgagtacgtttctttaattatgttccatcaggaatccgctgtgtggcttacaataaccagtcaaacagattggctgtttcacgaacagatggcactgtggaaatttataacttgtcagcaaactactttcaggagaaatttttcccaggtcatgagtctcgggctacagaagctttgtgctgggcagaaggacagcgactctttagtgctgggctcaatggcgagattatggagtatgatttacaggcgttaaacatcaagtatgctatggatgcctttggaggacctatttggagcatggctgccagccccagtggctctcaacttttggttggttgtgaagatggatctgtgaaactatttcaaattaccccagacaaaatccagtttgaaagaaattttgatcggcagaaaagtcgcatcctgagtctcagctggcatccctctggtacccacattgcagctggttccatagactacattagtgtgtttgatgtcaaatcaggcagcgctgttcataagatgattgtggacaggcagtatatgggcgtgtctaagcggaagtgcatcgtgtggggtgtcgccttcttgtccgatggcactatcataagtgtggactctgctgggaaggtgcagttctgggactcagccactgggacgcttgtgaagagccatctcatcgctaatgctgacgtgcagtccattgctgtagctgaccaagaagacagtttcgtggtgggcacagccgagggaacagtcttccattttcagctggtccctgtgacatctaacagcagtgagaagcagtgggtgcggacaaaaccgttccagcatcacactcatgacatgcgcactgtggcccacagcccaacagcgctgatatctggaggcactgacacccacttagtctttcgtcctctcatggagaaggtggaagtaaagaattacgatgccgctctccgaaaaatcacctttccccaccgatgtctcatctcctgttctaaaaagaggcagcttctcctcttccagtttgctcatcacttagaactttggcgactgggatccacagttgcaacaggcaagaatggggatactcttccactctctaaaaatgcagatcatttactgcacctaaagacaaagggtcctgagaacattatctgtagctgtatctccccatgtggaagttggatagcctattctacagtttctcggttttttctctatcggctgaattatgaacatgacaacataagcctcaaaagggtttccaaaatgccagcattccttcgctctgcccttcagattttgttttctgaagattcaacaaagctctttgtagcatcaaatcaaggagctctgcatattgttcagctgtcaggaggaagcttcaagcacctgcatgctttccagcctcagtcaggaacagtggaggccatgtgtcttttggcagtcagtccagatgggaattggctagctgcatcaggtaccagtgctggagtccatgtctacaacgtaaaacagctaaagcttcactgcacggtgcctgcttacaatttcccagtgactgctatggctattgcccccaataccaacaaccttgtcatcgctcattcggaccagcaggtatttgagtacagcatcccagacaaacagtatacagattggagccggactgtccagaagcagggctttcaccacctttggctccaaagggatactcctatcacacacatcagttttcatcccaagagaccgatgcacatccttctccatgatgcctacatgttctgcatcattgacaagtcattgccccttccaaatgacaaaaccttactctacaatccatttcctcccacgaatgaatcagatgtcatccggaggcgcacagctcatgcttttaaaatttctaagatatataagcctctactcttcatggatcttttggatgaaagaacactcgtggcagtagaacggcctctggatgacatcattgctcagctcccaccacccattaaaaagaagaaatttggaacctaaaacagggcactgtctgtgtccttccttgaactgtctaccctgttgcttttcacaaatcatggtaataaaacaagttattcttg

SEQ ID NO: 1578 - protein, 686 aa, Homo sapien
MGEFKVHRVRFFNYVPSGIRCVAYNNQSNRLAVSRTDGTVEIYNLSANYFQEKFFPGHESRATEALCWAEGQRLFSAGLNGEIMEYDLQALNIKYAMDAFGGPIWSMAASPSGSQLLVGCEDGSVKLFQITPDKIQFERNFDRQKSRILSLSWHPSGTHIAAGSIDYISVFDVKSGSAVHKMIVDRQYMGVSKRKCIVWGVAFLSDGTIISVDSAGKVQFWDSATGTLVKSHLIANADVQSIAVADQEDSFVVGTAEGTVFHFQLVPVTSNSSEKQWVRTKPFQHHTHDMRTVAHSPTALISGGTDTHLVFRPLMEKVEVKNYDAALRKITFPHRCLISCSKKRQLLLFQFAHHLELWRLGSTVATGKNGDTLPLSKNADHLLHLKTKGPENIICSCISPCGSWIAYSTVSRFFLYRLNYEHDNISLKRVSKMPAFLRSALQILFSEDSTKLFVASNQGALHIVQLSGGSFKHLHAFQPQSGTVEAMCLLAVSPDGNWLAASGTSAGVHVYNVKQLKLHCTVPAYNFPVTAMAIAPNTNNLVIAHSDQQVFEYSIPDKQYTDWSRTVQKQGFHHLWLQRDTPITHISFHPKRPMHILLHDAYMFCIIDKSLPLPNDKTLLYNPFPPTNESDVIRRRTAHAFKISKIYKPLLFMDLLDERTLVAVERPLDDIIAQLPPPIKKKKFGT

SEQ ID NO: 1579 - DNA, 1154 bp, Homo sapien
gcgcttgcgaagcgggctccggctcggctcgcggggactgtgcacgaggttggcgacgccgccccgccgggccccagatcaggccgcagagatcgggagccgcgggagcactaaggcgcaagggccacagcagcagccgggctcagagggtcccagctatgccaaaaaagttgcgctctggcttgctgggctgcttggagctggtgggactgtgagcgtcgtctatatctttggaaacaacccggtggacgaaaatggtgccaagattcctgatgagttcgacaatgatccaattctggtacagcagttgcgccggacatacaaatatttcaaagattatagacagatgatcatcgagcccaccagcccttgccttctcccagaccctctgcaggaaccgtactaccagccaccctacacgctcgttttggagctcaccggcgtcctcttgcatcctgagtggtcgctggccactggctggaggtttaagaagcgcccaggcatcgagaccttgttccagcagcttgcccctttatatgaaattgtcatctttacgtcagagactggcatgactgcgtttccactcattgatagtgtggacccccatggcttcatctcctaccgcctattccgggacgccacaagatacatggatggacaccatgtaaaggatatttcatgtctgaatcgggacccagctcgagtagtagttgtggactgcaagaaggaagccttccgcctgcagccctataacggcgttgccctgcggccctgggacggcaactctgatgaccgggtcttgttggatctgtctgccttcctcaagaccattgcactgaatggtgtggaggacgtgcgaaccgtgctggagcactatgccctggaggatgacccgctggcggctttcaaacagcggcaaagccggctagagcaggaggagcagcagcgcctggccgagctctccaagtccaacaagcagaacctcttccttggctccctcaccagccgcttgtggcctcgctccaaacagccctgaactctgggcctcctcaaactcagtgcctgggtccagggccccagtgcttccagaccaagacttgggccaccacttgtccaataaagtacatcccagacgccacaaaaaaaaaaaaaaa

SEQ ID NO: 1580 - DNA, 1490 bp, Homo sapien
tcatcatccagagcagccagtgtccgggaggcagaagatgccccactccagcctgcatccatccatcccgtgtcccaggggtcacggggcccagaaggcagccttggttctgctgagtgcctgcctggtgaccctttgggggctaggagagccaccagagcacactctccggtacctggtcctccacctagcctccctgcagctgggactgctgttaaacggggtctgcagcctggctgaggagctgcgccacatccactccaggtaccggggcagctactggaggactgtgcgggcctgcctgggctgccccctccgccgtggggccctgttgctgctgtccatctatttctactactccctcccaaatgcggtcggcccgcccttcacttggatgcttgccctcctgggcctctcgcaggcactgaacatcctcctgggcctcaagggcctggccccagctgagatctctgcagtgtgtgaaaaagggaatttcaacgtggcccatgggctggcatggtcatattacatcggatatctgcggctgatcctgccagagctccaggcccggattcgaacttacaatcagcattacaacaacctgctacggggtgcagtgagccagcggctgtatattctcctcccattggactgtggggtgcctgataacctgagtatggctgaccccaacattcgcttcctggataaactgccccagcagaccggtgaccgtgctggcatcaaggatcgggtttacagcaacagcatctatgagcttctggagaacgggcagcgggcgggcacctgtgtcctggagtacgccacccccttgcagactttgtttgccatgtcacaatacagtcaagctggctttagccgggaggataggcttgagcaggccaaactcttctgccggacacttgaggacatcctggcagatgcccctgagtctcagaacaactgccgcctcattgcctaccaggaacctgcagatgacagcagcttctcgctgtcccaggaggttctccggcacctgcggcaggaggaaaaggaagaggttaccgtgggcagcttgaagacctcagcggtgcccagtacctccacgatgtcccaagagcctgagctcctcctcagtggaatgggaaagcccctccctctccgcacggatttctcttgagacccagggtcaccaggccagagcctccagtggtctccaagcctctggactgggggctctcttcagtggctgaatgtccagcagagctatttccttccacagggggccttgcagggaagggtccaggacttgacatcttaagatgcgtcttgtccccttgggccagtcatttcccctctctgagcctcggtgtcttcaacctgtgaaatgggatcataatcactgccttacctccctcacggttgttgtgaggactgagtgtgtggaagtttttcataaactttggatgctagtgtacttaaaaaaaaaaaaa

SEQ ID NO: 1581 - protein, 379 aa, Homo sapien
MPHSSLHPSIPCPRGHGAQKAALVLLSACLVTLWGLGEPPEHTLRYLVLHLASLQLGLLLNGVCSLAEELRHIHSRYRGSYWRTVRACLGCPLRRGALLLLSIYFYYSLPNAVGPPFTWMLALLGLSQALNILLGLKGLAPAEISAVCEKGNFNVAHGLAWSYYIGYLRLILPELQARIRTYNQHYNNLLRGAVSQRLYILLPLDCGVPDNLSMADPNIRFLDKLPQQTGDRAGIKDRVYSNSIYELLENGQRAGTCVLEYATPLQTLFAMSQYSQAGFSREDRLEQAKLFCRTLEDILADAPESQNNCRLIAYQEPADDSSFSLSQEVLRHLRQEEKEEVTVGSLKTSAVPSTSTMSQEPELLLSGMGKPLPLRTDFS

SEQ ID NO: 1582 - DNA, 4788 bp, Homo sapien
aaccatagaacatgggaataggttttattttcatctcaagaacatttaagttgggtgaagaaattcagcttttgttgttagaatctgacaggcttcaaacacttgtgatggaggggttgttgtcatatcaaagtccacctagtaaagttttaggtgaccagtgactttgtcaattaggtctgctggtcctggcccaatccctaggacagtttgagagcctggtgcaatctgagtacgtccagcatcttgaattaaacttacagtcagtcccagcatttttgcatgggccaataatgcaatcagggtttcttcatcaggagctttgaccaccaccttgggctggccacagtattcccattgtttgagcatttcaggatttcttctttgaatctgcttgtaggctgaaacagcagcatgagagcactgggcagccactttcccttttcccatctttaagtcatttcgaaccacaagaatcatcttgtactccccgctgtctcccaagatgcttgcttcactttcagtatctgtgtgtgtcttgctcgtcttgcttttggggagcatcccaaagcatactcgaaggctccagccccaggcacatgccacaagcaactccaacagccaagccgagtgtactgggatgagccaaatattccataaccaaggatttggagggcatctacagtacctcctttcctcactcgcgccttcccttcttctgggcagcgaacacgtttctatcgcgtgagctacctcttccggggttcctgggtgacaagttccggatcaagaatcacaaagcgagcagtcattcttcctcttgccacacccacagggcccgcactaagagcctaactgaaatcccgcgaggatcaaccgagctcgccgaaaggagggaggaacgtatcccttctggaggctgtctcagggggcagagggaccggaccggaagtgacgtgagcgggttccggttgtctggagcccagcggcgggtgtgagagtccgtaaggagcagcttccaggatcctgagatccggagcagccgggggtcggagcggctcctcaagagttactgatctatgaaatggcagagaatggaaaaaattgtgaccagagacgtgtagcaatgaacaaggaacatcataatggaaatttcacagacccctcttcagtgaatgaaaagaagaggagggagcgggaagaaaggcagaatattgtcctgtggagacagccgctcattaccttgcagtatttttctctggaaatccttgtaatcttgaaggaatggacctcaaaattatggcatcgtcaaagcattgtggtgtcttttttactgctgcttgctgtgcttatagctacgtattatgttgaaggagtgcatcaacagtatgtgcaacgtatagagaaacagtttcttttgtatgcctactggataggcttaggaattttgtcttctgttgggcttggaacagggctgcacacctttctgctttatctgggtccacatatagcctcagttacattagctgcttatgaatgcaattcagttaattttcccgaaccaccctatcctgatcagattatttgtccagatgaagagggcactgaaggaaccatttctttgtggagtatcatctcaaaagttaggattgaagcctgcatgtggggtatcggtacagcaatcggagagctgcctccatatttcatggccagagcagctcgcctctcaggtgctgaaccagatgatgaagagtatcaggaatttgaagagatgctggaacatgcagagtctgcacaagactttgcctcccgggccaaactggcagttcaaaaactagtacagaaagttggattttttggaattttggcctgtgcttcaattccaaatcctttatttgatctggctggaataacgtgtggacactttctggtacctttttggaccttctttggtgcaaccctaattggaaaagcaataataaaaatgcatatccagaaaatttttgttataataacattcagcaagcacatagtggagcaaatggtggctttcattggtgctgtccccggcataggtccatctctgcagaagccatttcaggagtacctggaggctcaacggcagaagcttcaccacaaaagcgaaatgggcacaccacagggagaaaactggttgtcctggatgtttgaaaagttggtcgttgtcatggtgtgttacttcatcctatctatcattaactccatggcacaaagttatgccaaacgaatccagcagcggttgaactcagaggagaaaactaaataagtagagaaagttttaaactgcagaaattggagtggatgggttctgccttaaattgggaggactccaagccgggaaggaaaattcccttttccaacctgtatcaatttttacaacttttttcctgaaagcagtttagtccatactttgcactgacatactttttccttctgtgctaaggtaaggtatccaccctcgatgcaatccaccttgtgttttcttagggtggaatgtgatgttcagcagcaaacttgcaacagactggccttctgtttgttactttcaaaaggcccacatgatacaattagagaattcccaccgcacaaaaaaagttcctaagtatgttaaatatgtcaagctttttaggcttgtcacaaatgattgctttgttttcctaagtcatcaaaatgtatataaattatctagattggataacagtcttgcatgtttatcatgttacaatttaatattccatcctgcccaacccttcctctcccatcctcaaaaaagggccattttatgatgcattgcacaccctctggggaaattgatctttaaattttgagacagtataaggaaaatctggttggtgtcttacaagtgagctgacaccattttttattctgtgtatttagaatgaagtcttgaaaaaaactttataaagacatctttaatcattccaaaattgtgtccgttttcttgagcgttttgattttttacttttagcttataccagctgaatggcagccttgcctaatccacctacaacaagaatttcttaagctttcttttatttgcatgagagagccactaccaaggcatgttttgttatgctgaaactgggctgctgcatactgctaaatggcacctctgggattggcctacctggggatttcttggtttgtgaaaacaggagaggagaaatatctcatacaagtgaaaggatactggagagagaaattacccatttctaaaaaaaaaccacactctgtcgtatctgtgttaatgttttctagcatgtactctggtttcaacagacacaaatttatatgttaacccagttttcttgccgttctgtaagtgttttattcttagtgtgatttttttccattgggatgtttttgattgaacttgttcattttgttttgcttgggaggaaaataaacaattttacttttttcctttaggagcattatgagcattatgtcagaatagaatagaattggggttcgatcttaacaggccagaaatgcctgggtttttttggtttgtttttgtttttgtttttttatcaaatcctgcctgactgtctgcttgttttgcctaccatcgtgacatctccatggctgtaccaccttgtcgggtagcttatcagactgatgttgactgttgaatctcatggcaacaccagtcgatgggctgtctgacattttggtatctttcatctgaccatccatatccaatgttctcatttaaacattacccagcatcattgtttataatcagaaactctggtccttctgtctggtggcacttagagtcttttgtgccataatgcagcagtatggagggaggattttatggagaaatggggatagtcttcatgaccacaaataaataaaggaaaactaagctgcattgtgggttttgaaaaggttattatacttcttaacaattctttttttcagggacttttctagctgtatgactgttacttgaccttctttgaaaagcattcccaaaatgctctattttagatagattaacattaaccaacataattttttttagatcgagtcagcataaatttctaagtcagcctctagtcgtggttcatctctttcacctgcattttatttggtgtttgtctgaagaaaggaaagaggaaagcaaatacgaattgtactatttgtaccaaatctttgggattcattggcaaataatttcagtgtggtgtattattaaatagaaaaaaaaaattttgtttcctaggttgaaggtctaattgatacgtttgacttatgatgaccatttatgcactttcaaatgaatttgctttcaaaataaatgaagagcagctgtccttctttcctcttttaagtgttcagctgtggcatgctcagaggttcctgctggattccagctggagcggtgtgatacccttctttttcagctgttcgtgccttcctttcttgtatccaccaaagtggagacaaatacatgatctcaaagatacacagtacctacttaattccagctgatgggagaccaaagaatttgcaagtggatggtttggtatcactgtaaataaaaagagggcctgggaattcttgcgattccatctctactttgtataagtctcattttgtgccttacacatctgcagtatttatcatgttccaacttggtgactgtcaggcagtgcaatacatcagcagtttatcaccgaagagctgaggaatacctcccttaaaacagacaatgtc

SEQ ID NO: 1583 - protein, 406 aa, Homo sapien; identical to SEQ ID NO: 1328

SEQ ID NO: 1584 - DNA, 14248 bp, Homo sapien
tgcaacggaaacttttagctccacgaacagaaaagcaagagcaaaaactcagttaaatgcgttcttcctccatctttgcctagtccaaaaggaaaaaaaaaaaaaaagaaacagaaaaaagaaaaactgtttggaagagtagcgttgaggtttgctttttacctgtttttcctctagaacagccaggtggattcacatgatccaattttttaattgtcttctatgtcccactccgaataacccggatgccccagcacaatcagagagatcgttttttttaaaaaaaatttcagcctccaaaggtaggaggggagtgttaggggagaaagtactttaattaaaaatcaataactcgaggtttttgggatacggtttgccatttcctaattaagaaatgggtttgacagtccctttgtacacactgctatgcaaaccccaaagggttggcggctgtccgggcgatgacactccggtcccctgcgagaccccgggccagccaggcccctccgccgccggcctctggggtccgtccccggaagcaaggctcgcgcagacctctcgcttctctcggctctgtctcctgcgctcagctctgctcggggccggccgcctcaggctcgccgccaccaggtcgttgcaaataccttttccctccccggggccccagcgcgcggccacctcccagcctccccccctcccaccctggcagcggggccctttcccggctcaggaacagcagcagcccgggccgcgccggcaggaagcgaggcccatgttgctgctgttccctggcgcgcctccccgccctccgggggccgccacggctcttccgcgctcccgggcacccccctccgcgcctgcgctgtgccccacgggggcggggctcagattcctgtcagcggcggcggcggtggcggcgaccgtcagttttcgctgaggagaaacacgaaacggaccctttggctctcccccttccccttccccgtcctgaacccctctcctggtcaccgagaatcagtccccgtggagttccccctccacctcgccatcgtttcctcggtcctcggcccagtggaagtcactaccctcgaggaggaggcagcggcagccgccctcgcgtcgccgcccccggttcggtgcccgcggtcccggagaggaggtgccgccgccaccgccgctccccccctcccgctgccctcgggccgggctgggtcgagctgcgatgccctcggacttcatctcattgctcagcgcggacctagacctggaatcgcccaagtccctctactcgcgagattctctgaagttacacccatcacagaattttcatagagctggactattggaagaatctgtctatgatcttctcccaaaggagttacagttacctccatctagagaaacatctgtagcatcaatgagtcagacaagcggtggtgaggcaggctcgcctcctccagctgttgttgctgctggatttgcctctgaagcagggagtgtctgcattaaaaatgacctgtagttctctgcttcatagatgcttcttcagctccctcctcttcctccatgggcggtgcttgcagctcctttaccacctcttccagccctaccatttattctacctcagtcaccgacagcaaggctatgcaagtggagagctgctcctcagccgtgggggtaagtaacagaggggtaagtgaaaagcagttaaccagtaacacagttcagcagcatccatcaacaccgaagaggcacacagtcttgtacatctcaccaccacctgaggacttgctggataacagtcggatgtcctgccaggatgaggggtgtggattggaatctgagcagagctgcagtatgtggatggaggattccccctccaacttcagtaacatgagcaccagttcctacaatgataacactgaggtacctcgtaaatcacgaaaacgaaatccaaagcagaggccgggggtcaaacgacgagattgtgaagaatctaatatggatatatttgatgccgacagtgccaaagcacctcactatgtgctttctcagcttaccacggacaacaaaggcaactcaaaagcgggaaatggaacattggaaaaccaaaaaggaactggagtaaagaagagccctatgttgtgtggacaatatcctgttaaaagtgagggaaaggagctgaagatagttgtacaacctgagacacagcaccgagctcggtacctgactgagggcagccgtggctcagtgaaagatagaacacagcaaggctttcctacagtaaagctggaaggccataatgaacctgtagtgttgcaagtgtttgtgggcaacgactctggacgagtgaaaccacatggattttatcaggcctgcagagtaactggacgaaatacaactccttgcaaagaagtggacattgaaggcactactgttatagaagtcggccttgatcctagcaacaacatgacactggcggtggactgcgtagggatattgaaattgaggaatgctgatgtcgaagccagaataggaattgctggttccaagaagaaaagcactcgtgccagattggtttttcgagttaatatcatgaggaaagatggctccactttgacactgcaaacaccctcttctccaattttgtgtactcagccagcaggagtgccagaaatcttaaagaaaagcttgcatagctgttcagtgaaaggagaagaagaagtgtttttaatcggcaagaactttctgaaaggaactaaagttattttccaagaaaatgtttctgatgaaaactcttggaagtcagaagctgaaattgatatggaactatttcatcagaatcatcttattgtgaaggttcctccctatcatgaccaacatataactttgcctgtgtcagtgggaatatatgtagtgacaaatgctggaagatctcatgatgttcaaccattcacttacactccagacccagcagcagctggtgctttgaatgtaaatgtgaagaaggaaatatctagtccagcaagaccttgctcttttgaagaggccatgaaagcaatgaaaactactggatgtaatttagataaggtaaatattatccctaatgccctgatgactccactcataccaagcagtatgattaagagtgaagatgttactccaatggaggtaacagcagaaaaaagatcttccactatttttaagactacaaagtctgttggatcaactcagcaaacattagaaaacatctcaaacatagcaggaaatggctctttttcatcaccatcatcttcccacctaccttctgaaaatgaaaaacagcagcagattcacgccaaggcatacaacccagagaccctgacaactattcaaacccaggacatctcacagcctggtacttttccagcagtttctgcttctagtcagctgcccaacagcgatgcactattgcagcaggctacacagtttcagacaagagaaactcagtctagagagatattacagtcagatggtacagtggttaatttgtcacaactgactgaggcatcacaacaacagcagcagtcaccactacaagaacaagcacagactttacagcagcagatttcatcaaatatttttccatcaccaaatagtgtgagtcagcttcagaatactattcagcagctgcaagcagggagtttcacaggcagtactgctagtggcagcagtggaagtgttgacttggtccaacaagttttagaggcacagcagcagttatcttcagttttattttctgctccagatggtaatgagaatgttcaagagcagcttagtgcagatatttttcaacaagtcagtcaaattcagagtggtgtaagccctggaatgttttcctcaacagagccaacagtccataccagaccagataatttattacctggaagagctgaaagtgttcatccacagtctgaaaacacgttatctaatcaacagcagcagcagcagcagcaacagcaagtgatggaatcttcagccgcaatggtgatggagatgcaacagagtatctgccaggcagctgcccagattcagtcagagttattcccttcaactgcttcagcaaatggaaaccttcagcaatcgccagtttaccagcagacttctcacatgatgagtgcattgtctaccaatgaggatatgcaaatgcagtgtgaattgttttcttctcctcctgcagtttctggaaatgaaacttctacaactaccacacagcaggttgcaacccctggcactaccatgtttcagacatcaagttcaggagatggagaagaaactggaacacaagcaaaacagattcagaacagtgtctttcagaccatggtccaaatgcaacatagtggggacaatcaacctcaagttaaccttttttcatccacaaaaagtatgatgagtgttcagaatagtggtacccaacaacaaggtaatggtttattccagcaagggaatgagatgatgtcacttcaatctggaaattttttgcagcagtcttctcattcacaggcccaactttttcatcctcaaaatcctattgccgatgctcagaacctttcccaggaaactcaaggttctctctttcatagtccaaatcctattgtccacagtcagacttctacaacctcctctgaacaaatgcagcctccaatgtttcactctcaaagtaccattgctgtgttacagggctcttcagttcctcaagaccagcagtcaaccaacatatttctttcccagagtcccatgaataatcttcagactaacacagtagcccaagaagcattttttgcagcaccgaactcaatttctccacttcagtcaacatcaaacagtgaacaacaagctgctttccaacagcaagctccaatatcacacatccagactcctatgctttcccaagaacaggcacaacccccgcagcagggtttatttcagcctcaggtggccctgggctcccttccacctaatccaatgcctcaaagccaacaaggaaccatgttccagtcacagcactcaatagttgccatgcagagtaactctccatcccaggaacagcagcagcagcagcaacagcagcagcaacagcagcagcaacaacaacagagcattttattcagtaatcagaataccatggctacaatggcgtctccaaagcaaccaccaccaaacatgatattcaacccaaatcaaaatccaatggctaatcaggagcaacagaaccagtcaatttttcaccaacaaagtaacatggccccaatgaatcaagagcaacagcccatgcaatttcagagtcagtccacagtttcctcacttcagaacccaggtcctacccagtcggaatcatcacagacccccttgttccatagctctcctcagattcagttggtacaagggtcacctagttctcaagagcagcaagtaactctcttcttatctccagcatccatgtctgccttgcagaccagtataaatcaacaagatatgcaacagtctcctctttattcccctcagaacaacatgcctggaattcaaggagccacatcttcgcctcaaccacaggctactttatttcacaacacagcaggaggcacaatgaaccaactgcagaattctcctggctcatctcagcagacatcaggaatgttcttatttggcattcaaaataactgtagtcagcttttaacctctggaccagctacattgcctgatcagttgatggccataagtcagccaggccaaccacaaaacgagggccagccacctgtgacaacacttctttctcagcaaatgccagagaattctccactggcatcctctataaacaccaaccagaacatcgaaaagattgatttgcttgtttcattgcaaaaccaagggaacaacttgactggctccttttaactggatataaattccacgaagaaaatcctgattccaagatgtcctgagatcttgtggttccatgagaattattactttaaaaacaaaacaaaatataaaaaactgtgtttgagtaaactgatagattttactctgactgcaaaagagcacacctatgctgcttgttgcagtgactaaccaccaatgttaacatcttcatattttatattcctaataacagtgatgactgagaatctatttgagtttccagctggcagaattaattgttattattttcctaggcgcaatttccttaaacgtacagtttaaattcaaggctggaccactcagttattattgctattagaaaataatatatcatgtttacttttgttcttcattattttctttcctgcattgttttagtcaagtaatggcttttgaaaaagtaaagttcaataataactaaggctgtgatttttttcaatataaaaggcacagctgttggccaaagtgaaggaatcttttttcagttttattggagaaactgaagggtaacattctaacaagtaaactgtatgtgcagatagaagtactcttgatttaacacaaaggcagatgatacacttataaaactgggaacagctggaatgcttcttgattttattttttcagagagttgttagttctctgggtttctactaaggggtttagccataactgtgcatagaaaaataattatctgtaaaaaatgaaggggataatatatgataaattatgttctgatatcctcctacagtagtttaaattgacagaaaaatttgaatgttttcttcttaacccagtcttaggctggtattccctttttatatatatctatattacttttcacctctttttcactttactttagagaactattaatatactactggcttcatgaccctgtagcatctttggccactttaatctagggtgacctagcaatcctgcagcacagggcagagagtactgtcttaggaattattaggagttgattcctgagaaacaacacatttttccccatgaacggtgctgttctgaagtcttcaaatttttccctctaataggaaacagtataaattttaattaaaaaaaaaaggcaaactaaaatttcttgaaatatcacttctccctgatctgcagtgagtataaattcacttgtcacctcagtgctttacagtttgaagtggtcacttacctgatggttcccacaagccttaggctttacagggttgtatcattgacttaaaatgaagaattaacttgtgttacatctataaagagcaaaataacacactccagaacttggcagttgtagcattagttatacagttttgggtgttcttgccacccgtgggatgcctgcttctcactaccacctgtgtctggacacatgcttatgtctcattttccttttggcatgtggaaagctgtcaatgcagtgtaaggccaacgtgtgtgtggcttctatgtgttgagataatgttttggtatccttgtccgtttcatttattttttaagtgtacaaaaaataacctgttaattgttgaaggctacttttctgttcttttttttttttttttctatcctgtacatttagttgaactgtgcggaattgtggtgttggttttgtttacacagccagatttttccttctttttgttttgggatgatcttcctttgttctttgaatgggctcttttgctttttctcttttttctcatgttttcttccctccacctccacccctttctttctttctctctctgattgagaggcattgaattacgttttcagtagtacaggcttcttgccgatatgaagggaacttttcagaaagagacctactctgggtcatttaattttgaatacagttttcaatcgttcaagttttggatggtttatatctaatgtgtgtttcatttttttggaaagctatattttgtatttaggaaatggtatactattttgctatttgtactgagtgagtacattggcataaatatagaaatttatatatatacatatatataaactattcttttttgccacacatttttgtggtaaatttgtgagtttgtctgatgttctaccacaacgtggcgtctgataacagtgagggggggtggggtttgttatgtctttattgagtatttaagtatcttttgaaacaaatgacctgttcatctgtggccattccatcaggcagttagttccttgatgtcagtagtgggctaaaggcagcttactgtgtgtttgctggagctttcactcagccaagtgttagggtcaggaaacccattgaggcaatggcgtcaaatggtgtttcacaagaatgagccattcagtctttgctcactatatatttaatattttattattgttgttattgttattattaattggcctttctgtattctatgccttttatttataaagacactaagaaaacccatgtttgtaattttaataacatttttcccatcttgtaatatccagagctactttataaattctctgaaccaaaagtattttcctcagtgtatctcttctcccccagcccctattgggaaaaattacccagtatagttcaggttatgaggaggatcagccacacaatccagtgcttcagtttgaaaatgtaaaattctaaccctaaagtagggttggttgaaatttcagacaaagcaaacccagcaggtataaaaagtagtataaatacaaatctgtaagttatttttgaattttctgaacttttttctaagagattacataggagactaaagaaatctatctgttcaagttctaattaggatgattgttaatactgcactgtggatgaagtggcgactggcttgtgtgctgacttctgtggtttagcaagaggtttattgttatcaaatgctaattggcaatgccaagtcactgggaccaattttctgttttataatatctaagtttagaacagaatatatacctgaactgtagtggtttgatcggatggagacagaaaacccgatttttattctcataaattttgtggttatttatacaagggctgtgctatgctaccatattcttgttcaataataataggtttgttgttttttttacattgttaaatgttccttacccctaaaggtcaatgttaagtacaacattctgaaaatacaatttggctacaaagagtattcatcttctttgaagctcagtggttgatatttgtgctaataatgcaatttcctgattactgttacaagttatagctacatatgggagagactcaggtgagccagcaaaggccatagaaacaacaatttattaaatgtatttatggcagaaggacctaaataaactgtgagccaccttttcttctttatattgttacatttaagtgttctcgtttcaagcaactcacattaatgcttggagcttatctctttctctctctctctctctctctgtgtgtgtgtgtgtatgtgtgtgtgtgtgtgtgtgtgtttccttattgtcattccattatatatccacaccaacatgggtgacgataattcaaagtcatattttgcctctaagcttgatcatgttacctttatgattaaagtatcatgttatttagccaatgcaaatctgttttaaaacaaatagtttaaaaaaagaacaagtttttaagggctttattatagaagaagtattaatgaaggactttccttcctccctccctttcctcccctccctgcctcccttcttcccttccatctccccctcctccctgccttctttgtttctccttcccttattcctccctccctcctttctcccttccttcctttcttccattcatccttccttgccttttatttttattttttgtaatatcacatgtgctgtagtttggaattttattctagtgcatttcttgctcatcagaacctcagctaatctacctaggaaaaatagtatcaaaggaaatgagaaagttgtatctgagtccctccagaactaagataattctttttgaccatttaagcctttataaatgcgttttgaccatttaagcctttataaatgcttgttttaggaaagtgaatctgttagatgcatcaacaaataatgaccaggacaaaacgatttaataattaaagtctcaaatcaccatggttatacattttcaccagaaatagtaatcttacaatttttcatttttctgatgaagatttctgttacaatatctgtttcctaatagattttttaaattaattagctttcctctgctttatgaccataggttttatccctaaccgagacagctgtcttatatctgcatgccttagactgtgtggagggactccatgaagaaagaccataggttagaaaaataactcatagtatataccctagtaagtgggttagtagaatctcataacatgtattaaaaagaggttttcttctctgcttgtttgtgtcactagagcaaaattgtagagataatgctcataatgcagtaaatatcagaataatatctacaatatcatttgtggatggtcccaggtcccagtgctctagttactttacttcttttttttttttgagatggagtcttgctctgtctctcaggctagagcagtgtgcgatctcagctcactgcagcctccacctcccaggttcaagcgattctcctgcctcagcctcccaagtagccaggattacaggcaccctccactaggcccggctaattttttttgtatttttttagtagagatggggttttgccatgttggccaggctggtttcgaactcctaacctccagtgatccacctgcctcggcgtcccaaagtgctaggattacaggcatgagccaccacatccggtctaattacttctttaatccccatttatttttatgccattctagcctcatttattaataaaattatgtttttactttctctttcaggaaattttttaaattaatattttatatctagatcaaatgctatggaaaagtgcctttttatcatttataatttcatttttcactatttccaaaaacacataaacaaatagtttcagtaggtcccagcttttactttttccatttaaaccttcttttctccatttcttccctttggcttaagaataaaagaaaaggtacattgctagaattgtttctttgggagagggtaaaagattacagaattagactgttcagcctttatataaactaaatttgtcttcatctcaaccagctaatggtaggtcttatctgaatactcatgagaattttagcatctgtgaaactccatgcaccagatgtgtgtaaatttcaggaagaaagtgttgaaagcattttctctgatgttaattagatggaaataaatcactaaaacatagtttaggtaaagcctgattatgccacttttttttaactagacagggcaaagttgtttatgttagtgtacttcttgtctatcctcagttaatttacctagacaaaaagtgtcaaaggaaatgagaaaaaggttatatctgactccctccagacctaagataattccttttgatcagatacagtcagatggagtgccttggtttttgttaattttgcctctattccagctccttaccacagcggtggtgcttaaagaaaggatcatcagcaacaggtcaggatagttctacctttgggatagggctgctttccccgtgctagtatttctgtgactgttagtggcactgaggactgcaaacttttatgcaatattcttaataccctattgatattatgcactttaatcattccaaagaagccaagaatgctgtatagtgatgattccttcctaatgaattcatcttaactatttagaatgttatgtcccttttcttttggatagccaacttggtataaatgttatatggatttttctaaaatgactatataggacttaagactttgaaatgtaatttacttataaggggaaataattatgctttagcacatcattttagaaacgtcacattttagaacattcagcttgctaacctacatgtttgggaattcatttaaaaccaagtgtctatatattttgtgccatgtatataagaacattacaatatatctttttctacatatgtagtatgtgcaaccagtggttctcagagtatggttctcagcccaccagctagtatcagtatcacctgggaactagttagaaatgtaaattctttggccccatcccagacatactgagtcagaaactctggaatagggcccccgcaatctgttttcacaagccctccaggtgattctgatgcacactttaaagtttaggaaccactgggctaagactctgttgagatatagagtttttcttccactcagactgatatagttatacattgttcttcatgtaaattcagcttaacctggttatctataatcttttattggcaaaagttaattctcagtactgcctatagagatacagtgtattttatgtacatacacaattagtctaattcttgataattcagttaatttagtttggcattttcctaccacttactaaaaggtttacattaaatgactgatttaaatatataggtgcaatgttctatgtttattttaattgttatgacatttaagtagctaatataattgaccggtgctaaagtctcctgtttatccataaaatgggtacattatgggcagtgtaatacaagctttcttttcattgcctagtactttaccagcagaccacagttttgcctggctagaccaaccctcagaacaaaatcatcattccttgtatttatatttgtatctgagatagtaaacaagatggctggccaggtcaacatggcaccttaacttatttttttaataggtaaaacttcttcaaaagtagcttgctttgtataagaactaagctatcagtatagatatagctatccttggagcttatgtttcagacaagaattatttactaaaataaataataaacaagataatgcattatacatttgggcatttctcgtttctcaagtgtatgcatcatggtaaatataaactaaccacaagataggtagattgattcatttcattttaatctccttgtgtaattcagtacctccataattgttctaatcttcttcccactgtttacaaattaccagttaattaactcgtgaaagaaaaattcacatatcagaataaaaataaatgtatactcactttataaaaatcaccactgctgtctttccttaatactagcagtggaaatgtaagtggcttactctacaaattttggtgctggcaaatacataggcaaactgttgggagctgctctagttacattcctcccttcttattccctttttctcttcctcactttattgcataacatattcctgtacccaaagcattctaccacagttctatttgactcccacttgtaataactcctttaaaaaattccatgtttaaccatatgaccctgcttgcttactcatattctccctccctctccccttcctttctctctcttccagaagtcatttgcctggtttgaaatattttgtagggattgcttattatattattttagctgatgaacctcaggacaacgtctacacacacacacatacatacacgcacacaaaatctcagctgttgaagagtgggcttggaatcagacttctgtgtccagtaaaaaactcctgcactgaagtcattgtgacttgagtagttacagactgattccagtgaacttgatctaatttcttttgatctaatgaatgtgtctgcttaccttgtttccttttaattgataagctccaagtagttgctaattttttgacaactttaaatgagtttcattcacttcttttacttaatgttttaagtatagtaccaataatttcattaacctgttctcaagtggtttagctaccattctgccatttttaatttttatttaattttatttgcttgagcacactgatcaaccactgaactgccttcttccattgtcctgcaatgatataagggttacatttttgtgtatatggctttcatagttgggatttcagagcactgataccagatattttcagtttgttctctgggggaatttcatttgcatctatgtttttagctatctgtgataacttgttaaatattaaaaagatattttgcttctattggaacatttgtatactcgcaactatatttctgtaaacagctgcagtcaaaaataaaacactgaaagttaaaaaaaaaaaaaaaaaaaa

SEQ ID NO: 1585 - protein, 1455 aa, Homo sapien
MGGACSSFTTSSSPTIYSTSVTDSKAMQVESCSSAVGVSNRGVSEKQLTSNTVQQHPSTPKRHTVLYISPPPEDLLDNSRMSCQDEGCGLESEQSCSMWMEDSPSNFSNMSTSSYNDNTEVPRKSRKRNPKQRPGVKRRDCEESNMDIFDADSAKAPHYVLSQLTTDNKGNSKAGNGTLENQKGTGVKKSPMLCGQYPVKSEGKELKIVVQPETQHRARYLTEGSRGSVKDRTQQGFPTVKLEGHNEPVVLQVFVGNDSGRVKPHGFYQACRVTGRNTTPCKEVDIEGTTVIEVGLDPSNNMTLAVDCVGILKLRNADVEARIGIAGSKKKSTRARLVFRVNIMRKDGSTLTLQTPSSPILCTQPAGVPEILKKSLHSCSVKGEEEVFLIGKNFLKGTKVIFQENVSDENSWKSEAEIDMELFHQNHLIVKVPPYHDQHITLPVSVGIYVVTNAGRSHDVQPFTYTPDPAAAGALNVNVKKEISSPARPCSFEEAMKAMKTTGCNLDKVNIIPNALMTPLIPSSMIKSEDVTPMEVTAEKRSSTIFKTTKSVGSTQQTLENISNIAGNGSFSSPSSSHLPSENEKQQQIHAKAYNPETLTTIQTQDISQPGTFPAVSASSQLPNSDALLQQATQFQTRETQSREILQSDGTVVNLSQLTEASQQQQQSPLQEQAQTLQQQISSNIFPSPNSVSQLQNTIQQLQAGSFTGSTASGSSGSVDLVQQVLEAQQQLSSVLFSAPDGNENVQEQLSADIFQQVSQIQSGVSPGMFSSTEPTVHTRPDNLLPGRAESVHPQSENTLSNQQQQQQQQQQVMESSAAMVMEMQQSICQAAAQIQSELFPSTASANGNLQQSPVYQQTSHMMSALSTNEDMQMQCELFSSPPAVSGNETSTTTTQQVATPGTTMFQTSSSGDGEETGTQAKQIQNSVFQTMVQMQHSGDNQPQVNLFSSTKSMMSVQNSGTQQQGNGLFQQGNEMMSLQSGNFLQQSSHSQAQLFHPQNPIADAQNLSQETQGSLFHSPNPIVHSQTSTTSSEQMQPPMFHSQSTIAVLQGSSVPQDQQSTNIFLSQSPMNNLQTNTVAQEAFFAAPNSISPLQSTSNSEQQAAFQQQAPISHIQTPMLSQEQAQPPQQGLFQPQVALGSLPPNPMPQSQQGTMFQSQHSIVAMQSNSPSQEQQQQQQQQQQQQQQQQQSILFSNQNTMATMASPKQPPPNMIFNPNQNPMANQEQQNQSIFHQQSNMAPMNQEQQPMQFQSQSTVSSLQNPGPTQSESSQTPLFHSSPQIQLVQGSPSSQEQQVTLFLSPASMSALQTSINQQDMQQSPLYSPQNNMPGIQGATSSPQPQATLFHNTAGGTMNQLQNSPGSSQQTSGMFLFGIQNNCSQLLTSGPATLPDQLMAISQPGQPQNEGQPPVTTLLSQQMPENSPLASSINTNQNIEKIDLLVSLQNQGNNLTGSF

SEQ ID NO: 1586 - DNA, 1683 bp, Homo sapien
agaaacggcagtggcagcagcgtccggagcagccgcagccttctggaagctccaggcggtctttctgccgagcctcggtcccggcccccatcctccccgccccatcggttgttgtctgggcggatttaaacagtcaagtaaaatcaagctgggtaatcatggcagaaggtggatttgatccctgtgaatgtgtttgctctcatgaacatgcaatgagaagactgatcaatctgttacggcagtcccagtcctactgcacagacacagagtgtcttcaggaattaccgggaccctctggtgataatggcatcagtgttacaatgatcttggtagcctggatggttattgcattgatcttgttcttactgagacctcctaatctaagaggatccagcctacctggaaagccaaccagtcctcataatggacaagatccaccagctcctcctgtggactaactttgtgatatgggaagtgaaaatagttaacaccttgcacgaccaaacgaacgaagatgaccagagtactcttaaccccattagaactgtttttccttttgtatctgcaatatgggatggtattgttttcatgagcttctagaaatttcacttgcaagtttatttttgcttcctgtgttactgccattcctatttacagtatatttgagtgaatgattatatttttaaaaagttacatggggcttttttggttgtcctaaacttacaaacattccactcattctgtttgtaactgtgattataatttttgtgataatttctggcctgattgaaggaaatttgagaggtctgcatttatatattttaaatagatttgataggtttttaaattgctttttttcataaggtatttataaagttatttggggttgtctgggattgtgtgaaagaaaattagaaccacgctgtatttacatttaccttggtagtttatttgtggatggcagttttctgtagttttggggactgtggtagctcttggattgttttgcaaattacagctgaaatctgtgtcatggattaaactggcttatgtggctagaataggaagagagaaaaaatgaaatggttgtttactaattttatactcccattaaaaatctctaatgttaagaaaaccttaaataaacatgattgatcaatatggcagatgatttacagtccattatatgacatttgtaagccactcaacactagccttacaaggttcatgaaaggaggaaaacattaattctttctgcctttgctgatataatccacatagtaataatttaagctataatttatttttaaaatgagtgcctcttgggaagcttcttttctgttctaacagttccctgttaaaatgaaaatcttaggccagtgcagtggctcacacctgtaatctcagcactttgggaggctgaggtgggtggatcacttgaggtcaggagttcgagaccagcctggccaacatggtgaaaccctgtctctactaaaaatacagaaaaattagccagggttggtgcatgtgcctgtaatcccagctactcaggaggccaaagcaggagaattgcttgaacccgggaggtggaggttgcagtgaaccaagatcgcaccactgcattccagcctaagcaatagagcgagactccctcccaaaaaaaaaaaaaaaaaaaaaaaaaaa

SEQ ID NO: 1587 - protein, 99 aa, Homo sapien
MAEGGFDPCECVCSHEHAMRRLINLLRQSQSYCTDTECLQELPGPSGDNGISVTMILVAWMVIALILFLLRPPNLRGSSLPGKPTSPHNGQDPPAPPVD

SEQ ID NO: 1588 - DNA, 5647 bp, Homo sapien
  Unsure 159-181: Unknown base
cagcccggccttcgtcgccgccgcctccctgctgctcctcctcctttccccagcccgccgcggccatggcggacagcgccagcgagagcgacacggacggggcggggggcaacagcagcagctcggccgccatgcagtcgtcctgctcgtcgacctcgnnnnnnnnnnnnnnnnnnnnnnnaggcggcggcggtgggaagtcggggggcattgtcatctcgccgttccgcctggaggagctcaccaaccgcctggcctcgctgcagcaagagaacaaggtgctgaagatagagctggagacctacaaactgaagtgcaaggcactgcaggaggagaaccgcgacctgcgcaaagccagcgtgaccatccaagccagggctgagcaggaagaagaattcattagtaacactttattcaagaaaattcaggctttgcagaaggagaaagaaacccttgctgtaaattatgagaaagaagaagaattcctcactaatgagctctccagaaaattgatgcagttgcagcatgagaaagccgaactagaacagcatcttgaacaagagcaggaatttcaggtcaacaaactgatgaagaaaattaaaaaactggagaatgacaccatttctaagcaacttacattagaacagttgagacgggagaagattgaccttgaaaatacattggaacaagaacaagaagcactagttaatcgcctctggaaaaggatggataagcttgaagctgaaaagcgaatcctgcaggaaaaattagaccagcccgtctctgctccaccatcgcctagagatatctccatggagattgattctccagaaaatatgatgcgtcacatcaggtttttaaagaatgaagtggaacggctgaagaagcaactgagagctgctcagttacagcattcagagaaaatggcacagtatctggaggaggaacgtcacatgagagaagagaacttgaggctccagaggaagctgcagagggagatggagagaagagaagccctctgtcgacagctctccgagagtgagtccagcttagaaatggacgacgaaaggtattttaatgagatgtctgcacaaggattaagacctcgcactgtgtccagcccgatcccttacacaccttctccgagttcaagcaggcctatatcacctggtctatcatatgcaagtcacacggttggtttcacgccaccaacttcactgactagagctggaatgtcttattacaattccccgggtcttcacgtgcagcacatgggaacatcccatggtatcacaaggccttcaccacggagaagcaacagtcctgacaaattcaaacggcccacgccgcctccatctcccaacacacagaccccagtccagccacctccacctccacctccgccacccatgcagcccacggtcccctcagcagccacctcgcagcctactccttcgcaacattcggcgcacacctcctcccagccttaatgcatgagcttagtctgaatttcaagttgggactcatccaatggagccgtctactcaacgccaaaggcttccttctctggcatatttggatatgacttatttgcactgaggttatctaggcttcactatccattgtgttgtaaatgtttgtcagaaatgcagccagtgttgtgggtctacaacactaaccagacgactttttccatcagtgttttacttgaatcttcatgtacgtccattccctggctggaaccttcgctgtttggtatttggtatttcagcagcagtgtgcaatttttgcttggcccagagcttcattctcctggcttttaggtttgtaaaagaaaaagggatatcttttttatatttttttccatgaatctgcagaaaattactgagctgttgttaccctcctctcattataatagtgtttaccaaacataccaataattcagcactacaattcagacctttgaaaatctggctttcagtgtagaacagaaagttagatgaatcagtgcccaagacatattttctgtttaacagaactttctacagatacattttttacaggttattttcattgtgttattgacatccatgtctctcgtaaaacagatggcccaaagtaatgaatcatgtggctgtaccttctccacataaatgggatggataattatcgtatattaagatgtgattctcttttttatccttaatgttaatctacttaacctggccccctctaacatgagtcgataaatgttgtcctactcaccggtggtttcaatggctaattagaatgtgttatttgatttctgctgcagaaggcagtgtgattgtaacaaaaacaatgcggcttccccctttcgtacttcatttgtgttctcttaaaatagagtttgaacaaatattttaaaggtgcaaaataccattagaaaatactatttgaaatggacattatcgcattatcttggcataatggccagaaaatattgtattgcttggcagaaaagaaaataaggtctaaaggaaagtagcacattagcattgatggctgttcatttcacccagtataagcaagtgcagtgtacaaagaagtatattctgaatacattatttccattcatttagcacaaataaatcatttggtttcactttgcagtggaacactgagtcactcttttcttaacacgtgcaacatcttaatttttgtttttcagcagttgctgttttgtactttggtagtgaagtgatttttaccacctgtgtttgcatatttatatatgctgtggatgaaaataacttactagagaatgtatattttatgacaagaatgtgtatctgttggatataatcagagaactgaaaagtaatttatcagtaatttttaagagtccatgttttgtgacaaccatctctaatagccaactctttattaaacacactcctaaaaataaggaaccatgacattgtagatatttaatattgtacagtatagaaacctccatttttgccttcgaatgcatatttaagagttaacagaatgaaaaaaaaaagtcttgttggataatagtgtttgactagcgttttaagaacttgagagtaaaagcaacaataagattttttcacctcttcctgcttccacccccaaactgagaacatcactcaattgtttggaagaaactgtaggtctatataaattttatttataatgtatgtgtaatatacataatcataatacagttctcagatgcagggaagaagtttggcatttaatcattgaggctttaggtttttgatgtgatcagactgggccatgtcaaacccggaattttcaccaacagttcactcaccctcctggtacattgccattccaaggaattctgagagtaggcaaacaaattttgccttcatggtacagttctcagtttttcttataggagaaatatggtatatgtttataagaatcttttatgagattatagatttcaatgctgtggatagtgtcttgcacccaaacaagaaagtccataatggaatgatcttccctcagcttcctatcgatttagttacctcttgaaagcacaaaaattaaaacattgccatatgttgaatttttaaaaagcacttggagtgagcgaacatttcctgataaatgccttttagagataggttcttgatattcagacatctgcagaaatgttctggttcccaaagtcatttcacttcgaaataaaacacagctccttcaaacagcactttttccacataaatctagttgcctctccctgtggacattcagaactgatagaacaaacactactcttttgaatttgatggttcgtgtcctttaaagtgtttgaggacctatgcagagcctgtaacacttgggtagtacctgctaggacaatttcttggcaattgtcttactactagggatcagtaagatttagattctgagcccataatggcaacagccccctcacctatgggaagctgacttccctcagtcgggcacttctcatgggggctgaacatggttcctgccattctgttacccactctcccaggtgagccctggattggctcccagaaggcctttgtaaaatcagtagccatcctgcaggcaggtgggagcaacaggggcttcagtagcttcattttcctgtcttgcagacagagacccttggctaccactgtgctgctaataggataagtactctgttgccagattaccatgccttttatacaaaaccaaattaacttacctaatacctgacacctctttgggctctgaactgctttctctcatcaagcatgctagcactctagacagaattctagaaatttggcagacagtggaagcctttaattgaacttactccttcgttgactgaaaggagttttaaattctgagctcctgagatactgactagcaaccatggaatgaatgtgtgaccagaaagtggctttgacaccaagtgctactgtccctttgtaattggcttctaacagattcaaccagaaataattgataatgtgaatttttgttaattgttcacttgtaggaaaatagaacatgtatcaccctttgttaggtagacatgaacttttcctgcacaaagccttgcttttagagaatgcccaataaggcaagaaaaagcatagtaacttgtgctttgagagctcaatatttgtatcttatcagtacagaagaaatatttctgtgtaacttgatcttctgtctagtacttgtcttataggtaaccaacactgaaaactttgtagtgatgactaccaaagaaatacatagtaaaacaaccttttatttccaaattgttaaagagccagccattgatgctgctacatgagttccatgctcaagagccattgtaagagattaaggggtttctaggtttttggtgattttttgtttgttctttttctttgttttttagggtttttttttcttctttaattttttgattaaaacatacacacagctgttagcataaagtcgtggggggcattttctggaatgctcagcagttctgattaactgccaagcccaggttgcctctcatgaggcaactgaaaaaatcctgtgtcttgatagcatgggtgctgtgtgtgtgcatgtgtgtgtctgcattcatgccttaactcgggttactgcacaactttagttcttgacttagtctgcaccgtcatctagattgtattgtacatctcggtctgaacttcatcctggcaaaaacaaagttgcaggcacaacagtttaagaatgcattcctccagaagagtatctggtcaggttgaccctgagccttctttggacttgatttggaacttagcctggaaagcgaaagtggactgtccaacagaaagatgtcaacaaggaaaagaggagagccaagcgctagcatgccttttgcctctgcatatctgtgcacactgtatgttgttcatgatagcttgtctacaacttgactaggttggagttctggtaatagtggcaatcttgacattcttggtcagagtttagagagatgtaagactttcaattaatgtcttatttactcctttatgttgattagtctttgatacatgtgctgaatcagaaacctaaataaagataattttttaaaatgtaaaaa

SEQ ID NO: 1589 - protein, 495 aa, Homo sapien
  unsure 53: unknown amino acid
  unsure 54: unknown amino acid
  unsure 55: unknown amino acid
  unsure 56: unknown amino acid
  unsure 57: unknown amino acid
  unsure 58: unknown amino acid
  unsure 59: unknown amino acid
  unsure 60: unknown amino acid
ARPSSPPPPCCSSSFPQPAAAMADSASESDTDGAGGNSSSSAAMQSSCSSTSXXXXXXXXGGGGGKSGGIVISPFRLEELTNRLASLQQENKVLKIELETYKLKCKALQEENRDLRKASVTIQARAEQEEEFISNTLFKKIQALQKEKETLAVNYEKEEEFLTNELSRKLMQLQHEKAELEQHLEQEQEFQVNKLMKKIKKLENDTISKQLTLEQLRREKIDLENTLEQEQEALVNRLWKRMDKLEAEKRILQEKLDQPVSAPPSPRDISMEIDSPENMMRHIRFLKNEVERLKKQLRAAQLQHSEKMAQYLEEERHMREENLRLQRKLQREMERREALCRQLSESESSLEMDDERYFNEMSAQGLRPRTVSSPIPYTPSPSSSRPISPGLSYASHTVGFTPPTSLTRAGMSYYNSPGLHVQHMGTSHGITRPSPRRSNSPDKFKRPTPPPSPNTQTPVQPPPPPPPPPMQPTVPSAATSQPTPSQHSAHTSSQP

SEQ ID NO: 1590 - DNA, 394 bp, Homo sapien
ataaaattctgcttgttaagaacaagtttggctctggtaactgaccttcaaagctaaaatataaaactatttgggaagtatgaaacgatgtctcgtgatctggtgtacccttatccctgtgacgtttggcctctgacaatactggtataattgtaaataatgtcaaactccgttttctagcaagtattaagggagctgtgtctgaaatggcactgtcttgtcagtcatttctgtttacctttttcttctgcccagagtgtatttgtgaagagtctcttatattatgttttgtggaaatcagcacacaaccacaatgacatttaagcacaggatcattattagtctatgtttttaataaacatatcaattaagaaaaaaaaaaaaaaaaaaaaaa

SEQ ID NO: 1591 - DNA, 2288 bp, Homo sapien
ggcacgaggccgccatggcctctctactcgccaaggacgcctacctgcagagcctggccaagaagatctgctcccattcggccccggaacagcaggcgcgcacgcgggctggcaaaactcaaggctcagaaactgcagggcccccaaaaaagaaaaggaagaaaacacaaaagaaattccggaagcgagaagagaaggctgctgagcacaaggccaagtccttgggggagaaatctccagcagcctctggggccaggaggcctgaggcagccaaagaggaagcagcttgggcttccagctcagcagggaaccctgcagatggcctggccactgagcctgagtctgtctttgctctggatgttctgcgacagcgactgcatgagaagatccaggaggcccggggccagggcagtgccaaggagctgtcccctgccgccttggagaaaaggcggcggagaaagcaggaacgggaccggaagaagaggaagcgaaaggagctgcgggcgaaagagaaggccaggaaggctgaggaggccacggaggcccaggaggtggtggaggcaaccccagagggggcctgcacggagccgcgggagccgcccgggctgatcttcaataaggtggaggtgagcgaagacgagccggccagcaaggcgcagcgcagaaaagagaagaggcagagggtgaaggggaacctcacgccgctgaccgggaggaactaccggcagctgctggagcgcctgcaggcacggcagagccggctggacgagctgcgcggccaggatgaggggaaggcgcaggagctggaggcgaagatgaagtggaccaacctcctctacaaggcggagggcgtgaagatccgtgacgacgaacgcctgctgcaggaggccctgaagcgcaaggagaagcgcagggcgcagcggcagcgccggtgggagaagcgcacggccggcgtggtggagaagatgcagcagcgccaggaccggcggcggcagaacctgcgcaggaagaaggcggcccgcgccgagcgccgcctgctcagagcccgcaagaagggccgcatcctgccgcaggacctggagcgcgcaggcctggtctgagtctttcccacctggggccgccgtcttccgtcctaggagactccaggacaccctctgagtccttgacgctggctctgtcccaggatctccacagacctcggcctctccatgtgagggggacacagtggtgctctgctgagttgtgagggcccagatcacagatcccatgtgagaaagagagagtttcagcgtcatccttgaacgcaggatccgggaccttcagacccagggaaagggtgagggagactggggcctggtctgctttcccgggcctgaaagcttccccgaggtttgcagggtcagggaggaggaacggtgggggtgggcagtcactgcctgttccccactgcctgtgttcgcaggagccacgggacagaagacggtggcctctgctgccgggccacgttagtccgcagctcacccgaacagaggacaaccctgaggtgtggcatatgggcacctggcactgggagtcgggggagcacgtccaggcgtggtgcatcctggggcagaacgccatggctcctccccgctctcttggcttctgcctgttggggtctcattcctttctgttccccagtgccccggggcggcattttactgctcagaatttggagggagggagcagtaccttcccggagtccacgcatgtgagttgggtcaagtgcattggacctagggaaagagaaagaaagaataaaagctggagagagagtgaagtgaatgcaagatacaaagtgggatggaagaattaaatccagagttccaggcaatcaaaatgagtgcaggttgaaagaaaacaggtgaattttagtggcatatggatgataaagctgtaaataaaattcttttgatgaaactctccggttatgagacaaagactgtaactgaacaggagctggtgtgactgttaccagacagaggcaactgatgaaaaagccctgtgaaagataggatgtgaggtgagcatgagcttgagctgagagacagacacaacagtatctgaaaagaatacatactctttccatgcatatatggaacatggatggaaactgaccacctactttgtccagaaaagaagtcttaagatatttcaaggaatcagtgtcgttatctgaccgtatcccaatgtcattaaaaaaaatttgagctaaaaaaaaaaaaaaaaaaaaaaaaaaaaaaaaaaaa

SEQ ID NO: 1592 - protein, 361 aa, Homo sapien
MASLLAKDAYLQSLAKKICSHSAPEQQARTRAGKTQGSETAGPPKKKRKKTQKKFRKREEKAAEHKAKSLGEKSPAASGARRPEAAKEEAAWASSSAGNPADGLATEPESVFALDVLRQRLHEKIQEARGQGSAKELSPAALEKRRRRKQERDRKKRKRKELRAKEKARKAEEATEAQEVVEATPEGACTEPREPPGLIFNKVEVSEDEPASKAQRRKEKRQRVKGNLTPLTGRNYRQLLERLQARQSRLDELRGQDEGKAQELEAKMKWTNLLYKAEGVKIRDDERLLQEALKRKEKRRAQRQRRWEKRTAGVVEKMQQRQDRRRQNLRRKKAARAERRLLRARKKGRILPQDLERAGLV

SEQ ID NO: 1593 - DNA, 1476 bp, Homo sapien
ggcacgaggggatggcagaggaggtgaggagggaggaagcgtccggagtggggcgggcccggactccgacccccggggcgcttcgagccccccagctggtcaccgaggcaccgccgcttcacccaggccagtagccgcccccctcgcgcaccccggccccgcctcacacgcgcgcccgagcgagccccgggctcccctcgggcccagcgtggcgcaggggtcagtggttctctcgggtctcgggacaggtgagcaccctgatgaaggccacggtcctgatgcggcagcctgggcgggtgcaggagatcgtgggcgccctccgcaagggcggcggagaccggttacaggtgatttctgattttgacatgaccttgagcaggtttgcatataatggaaagcgatgcccttcttcttacaatattctggataatagcaagatcatcagtgaggagtgtcggaaagagctcacagcgctccttcaccactattacccaattgagatcgacccacaccggaccgtcaaggagaagctacctcatatggtggaatggtggaccaaagcgcacaatctcctatgtcagcagaagattcagaagtttcagatagcccaggtggttagagagtccaatgcaatgctcagggagggatataagaccttcttcaacacactctaccataacaacattccccttttcatcttttctgcgggcattggtgatatcctggaagaaattatccgacagatgaaagtgttccaccccaacatccacatcgtgtctaactacatggattttaatgaagatggttttctccagggatttaagggccagctgatacacacatacaacaagaacagctctgtgtgtgagaactgtggttacttccagcaacttgagggcaaaaccaatgtcatcctgctgggagactctatcggggacctcaccatggccgatggggttcctggtgtgcagaacattctcaaaattggcttcctgaatgacaaggtggaggagcggcgggagcgctacatggactcctatgacatcgtgctggagaaggacgagactctggatgtggtcaacgggctactgcagcacatcctgtgccagggggtccagctggagatgcaaggcccctgaaggcgcaggctccagcccggcctgcaggccgtggtgaggaggggcgcctccccagagtctgctcccccgtgaacacagagcagaggccagggtggccagcagtggctgggtccttccgcgcccctccgtcctcctttccctgagcaccttcatcaccagaggcttgaaggaaccccgccatgtggcagggcacaggcactgttcctggtgaaccttggaccacagcatgtcagtgctctagggattgtctactccagggattttcttcaaaatttttaaacatgggaagttcaaacaaatataatgtgtgaaacagaaaaaaaaaaaaaaaaaaaaa

SEQ ID NO: 1594 - protein, 257 aa, Homo sapien
MTLSRFAYNGKRCPSSYNILDNSKIISEECRKELTALLHHYYPIEIDPHRTVKEKLPHMVEWWTKAHNLLCQQKIQKFQIAQVVRESNAMLREGYKTFFNTLYHNNIPLFIFSAGIGDILEEIIRQMKVFHPNIHIVSNYMDFNEDGFLQGFKGQLIHTYNKNSSVCENCGYFQQLEGKTNVILLGDSIGDLTMADGVPGVQNILKIGFLNDKVEERRERYMDSYDIVLEKDETLDVVNGLLQHILCQGVQLEMQGP

SEQ ID NO: 1595 - DNA, 1513 bp, Homo sapien
ctccgtctcaaaaaagatgaaaataaaataaaatatatatttacaggcctacaacttttgcctcagactgttccccttttctaagggtattcaagttttcaccttttaagcttcatatcctcagtgcttgtagaatgatgagcttagaggtaccaggtcattgcagttgtttgcttaaagacttattgaaatggttactggcgtaaatacttggccaactcaactttattgcccctgatcttttccatttttgtttccaccttaacctatagcagctcctccaaatgaggaatgctgtaagtaagactcatcaaacagattttaaccattttattatcctgtgtgtccttacattgcttctgtgagatgtttttttcttatctgagatgaactttcaggagcctatttgaactccagactggtgttctggggcaaagagctattagccaaactgattctatgcaggtgaaggatgcactaaagttctcactttagtgagaacttttctagctattccaatacagagttctttcttatagggctattgatattgacaccaaatggagtggcttctcagcctcttaatgtcttaagtaagtgcttaatttggaatagagaaaccagtatattttaaaaaaagaaaaatattctttgtagcaactgtaaattctcccattataacagtgaacagagctccaggtaataacgcataggcatgtcaggttgcatctgtatatttgactacattagtattagtgacatcaggtggatataaaagaaaacccttggaaagagaactgccttagccatgatttcgttagtagacctatttatgattcaattgcaattttcagataggatgtgaacatggaatttcattgaaaatagtttaattttttatataaaaggttttgtatataatgtgtgtcagtgactattttcaaaatcattttcatcaagacaccttttttctaaaataggcattgcatacacatatgcacacgtatgtgcatgtgccacacattttttgtataatgttgggtttgattataaaagtgttgtcaaatgttttatttatctgcatatagcagtggttggcttttttgaattgaaatttttgcgcattgatgcattgaaataaggaaaattatttatctctgagcactaaacttatttttgcatatttctgtaatattgcagtccccagatccagaacatgggaagttagggaaaatgtgtgattttgtgttttgaattactgtcagaattacatacacaattacaacaaactttttttaaaagacatttcattgtactgcaaaaatctgaatatttatatttcttgtttttttctttatatgttttgcattttaatatgttgagccactggaaatttgtaacagattaatttgttataggagtttaaatgtgttgtcattgtctccattgtctttgtccagagcctattattatggaaacaataaaatttattgtgtcagttgctttgattctt

SEQ ID NO: 1596 - protein, 28 aa, Homo sapien
MCCHCLHCLCPEPIIMETIKFIVSVALI

SEQ ID NO: 1597 - DNA, 963 bp, Homo sapien
tctccacgtgggtaccggcgctctcggcgcccgtagccacccgcccgccggaagccgacatctcgagttctggcagaagcaatttgcgcggcgaggagcggagcggcaggaacccaataagctgcttcgcctcggagctgaagcccgtactcaagatggcggctccgggcgggcgtggccagtgactagaaggcgaggcgccgcgggaccatggcggcggcggcggacgagcggagtccagaggacggagaagacgaggaagaggaggagcagttggttctggtggaattatcaggaattattgattcagacttcctctcaaaatgtgaaaataaatgcaaggttttgggcattgacactgagaggcccattctgcaagtggacagctgtgtctttgctggggagtatgaagacactctagggacctgtgttatatttgaagaaaatgttgaacatgctgatacagaaggcaataataaaacagtgctaaaatataaatgccatacaatgaagaagctcagcatgacaagaactctcctgacagagaagaaggaaggagaagaaaacataggtggggtggaatggctgcaaataaaggataatgatttctcctatcgacccaacatgatttgtaactttctacatgaaaatgaagacgaagaagtggtagcttcagccccagataaatctttggaattggaagaggaagagattcaaatgaacgacagttcaaacctgagttgtgaacaggagaaaccaatgcacttggaaatagaagattctggtcctcttattgatataccttctgagacagaaggttctgtttttatggaaactcaaatgctgccttagaaatcactctcctagatgaaatgtttctcataataacttgtcaagaactttttagagttgttacataaaaataattgctgctgtagcttgtcaaaaaaaaaaaaaaaaaaa

SEQ ID NO: 1598 - protein, 213 aa, Homo sapien
MAAAADERSPEDGEDEEEEEQLVLVELSGIIDSDFLSKCENKCKVLGIDTERPILQVDSCVFAGEYEDTLGTCVIFEENVEHADTEGNNKTVLKYKCHTMKKLSMTRTLLTEKKEGEENIGGVEWLQIKDNDFSYRPNMICNFLHENEDEEVVASAPDKSLELEEEEIQMNDSSNLSCEQEKPMHLEIEDSGPLIDIPSETEGSVFMETQMLP

SEQ ID NO: 1599 - DNA, 13024 bp, Homo sapien
  Unsure 316-340: Unknown base
gcgagcctctctcgcgcacaaagttgtggagtcgtttttcctcggagcagggaagcgggcagcagcagccggccgcgggctttctcccgccgaggggcgaggaggagcctctggctccagaagccgattggggaatcacggggagcggcgccccccttcttttgggtcatttctgcaaacggaaaactctgtagcgtttggcaaagttggtgcctgcgcgccccttccaggtttgcgctttgactgttttgtttttggcggaactaccaggcaggaagattgcacaagtaaggggcgttttcagtcgggtgtcaannnnnnnnnnnnnnnnnnnnnnnnnaaagatttcggttcgtgtctgcttctccaagctttattttttttttaaaatacatcgcaccaccaaactcacactcgcacacacccccgcggttactccgtgtcaaactcctagaggagcccttggccagctcggggtgcggcggtggcgaccggcaggcgaggaggcccgcgggcagcaggtattgatgtcaagctgaaccatcgtaggaagttgaaagccttagaaagaggacttggtaaagtttttggattatcttgaaactctggcaaaatggccaagtatggagaacatgaagccagtcctgacaatgggcagaacgaattcagtgatatcattaagtccagatctgatgaacacaatgacgtacagaagaaaacctttaccaaatggataaatgctcgattttcaaagagtgggaaaccacccatcaatgatatgttcacagacctcaaagatggaaggaagctattggatcttctagaaggcctcacaggaacatcactgccaaaggaacgtggttccacaagggtacatgccttaaataacgtcaacagagtgctgcaggttttacatcagaacaatgtggaattagtgaatatagggggaactgacattgtggatggaaatcacaaactgactttggggttactttggagcatcattttgcactggcaggtgaaagatgtcatgaaggatgtcatgtcggacctgcagcagacgaacagtgagaagatcctgctcagctgggtgcgtcagaccaccaggccctacagccaagtcaacgtcctcaacttcaccaccagctggacagatggactcgcctttaatgctgtcctccaccgacataaacctgatctcttcagctgggataaagttgtcaaaatgtcaccaattgagagacttgaacatgccttcagcaaggctcaaacttatttgggaattgaaaagctgttagatcctgaagatgttgccgttcagcttcctgacaagaaatccataattatgtatttaacatctttgtttgaggtgctacctcagcaagtcaccatagacgccatccgtgaggtagagacactcccaaggaaatataaaaaagaatgtgaagaagaggcaattaatatacagagtacagcgcctgaggaggagcatgagagtccccgagctgaaactcccagcactgtcactgaggtcgacatggatctggacagctatcagattgcgttggaggaagtgctgacctggttgctttctgctgaggacactttccaggagcaggatgatatttctgatgatgttgaagaagtcaaagaccagtttgcaacccatgaagcttttatgatggaactgactgcacaccagagcagtgtgggcagcgtcctgcaggcaggcaaccaactgataacacaaggaactctgtcagacgaagaagaatttgagattcaggaacagatgaccctgctgaatgctagatgggaggctcttagggtggagagtatggacagacagtcccggctgcacgatgtgctgatggaactgcagaagaagcaactgcagcagctctccgcctggttaacactcacagaggagcgcattcagaagatggaaacttgccccctggatgatgatgtaaaatctctacaaaagctgctagaagaacataaaagtttgcaaagtgatcttgaggctgaacaggtgaaagtaaattcactaactcacatggtggtcattgttgatgaaaacagtggtgagagtgctacagctatcctagaagaccagttacagaaacttggtgagcgctggacagcagtatgccgttggactgaagaacgctggaataggttacaagaaatcaatatattgtggcaggaattattggaagaacagtgcttgttgaaagcttggttaaccgaaaaagaagaggctttaaataaagtccagacaagcaacttcaaagaccaaaaggaactaagtgtcagtgttcgacgtctggctattttgaaggaagacatggaaatgaagcgtcaaacattggatcagctgagtgagattggccaggatgtgggacaattacttgataattccaaggcatctaagaagatcaacagtgactcagaggaactgactcaaagatgggattctttggttcagagactagaagattcctccaaccaggtgactcaggctgtagcaaagctggggatgtctcagattcctcagaaggaccttttggagactgttcgtgtaagagaacaagcaattacaaaaaaatctaagcaggaactgcctcctcctcctcccccaaagaagagacagatccatgtggatattgaagctaagaaaaagtttgatgctataagtgcagagctgttgaactggattttgaaatggaaaactgccattcagaccacagagataaaagagtatatgaagatgcaagacacttccgaaatgaaaaagaagttgaaggcattagaaaaagaacagagagaaagaatccccagagcagatgaattaaaccaaactggacaaatccttgtggagcaaatgggaaaagaaggccttcctactgaagaaataaaaaatgttctggagaaggtttcatcagaatggaagaatgtatctcaacatttggaagatctagaaagaaagattcagctacaggaagatataaatgcttatttcaagcagcttgatgagcttgaaaaggtcatcaagacaaaggaggagtgggtaaaacacacttccatttctgaatcttcccggcagtccttgccaagcttgaaggattcctgtcagcgggaattgacaaatcttcttggccttcaccccaaaattgaaatggctcgtgcaagctgctcggccctgatgtctcagccttctgccccagattttgtccagcggggcttcgatagctttctgggccgctaccaagctgtacaagaggctgtagaggatcgtcaacaacatctagagaatgaactgaagggccaacctggacatgcatatctggaaacattgaaaacactgaaagatgtgctaaatgattcagaaaataaggcccaggtgtctctgaatgtccttaatgatcttgccaaggtggagaaggccctgcaagaaaaaaagacccttgatgaaatccttgagaatcagaaacctgcattacataaacttgcagaagaaacaaaggctctggagaaaaatgttcatcctgatgtagaaaaattatataagcaagaatttgatgatgtgcaaggaaagtggaacaagctaaaggtcttggtttccaaagatctacatttgcttgaggaaattgctctcacactcagagcttttgaggccgattcaacagtcattgagaagtggatggatggcgtgaaagacttcttaatgaaacagcaggctgcccaaggagacgacgcaggtctacagaggcagttagaccagtgctctgcatttgttaatgaaatagaaacaattgaatcatctctgaaaaacatgaaggaaatagagactaatcttcgaagtggtccagttgctggaataaaaacttgggtgcagacaagactaggtgactaccaaactcaactggagaaacttagcaaggagatcgctactcaaaaaagtaggttgtctgaaagtcaagaaaaagctgcgaacctgaagaaagacttggcagagatgcaggaatggatgacccaggccgaggaagaatatttggagcgggattttgagtacaagtcaccagaagagcttgagagtgctgtggaagagatgaagagggcaaaagaggatgtgttgcagaaggaggtgagagtgaagattctcaaggacaacatcaagttattagctgccaaggtgccctctggtggccaggagttgacgtctgagctgaatgttgtgctggagaattaccaacttctttgtaatagaattcgaggaaagtgccacacgctagaggaggtctggtcttgttggattgaactgcttcactatttggatcttgaaactacctggttaaacactttggaagagcggatgaagagcacagaggtcctgcctgagaagacggatgctgtcaacgaagccctggagtctctggaatctgttctgcgccacccggcagataatcgcacccagattcgagagcttggccagactctgattgatggggggatcctggatgatataatcagtgagaaactggaggctttcaacagccgatatgaagatctaagtcacctggcagagagcaagcagatttctttggaaaagcaactccaggtgctgcgggaaactgaccagatgcttcaagtcttgcaagagagcttgggggagctggacaaacagctcaccacatacctgactgacaggatagatgctttccaagttccacaggaagctcagaaaatccaagcagagatctcagcccatgagctaaccctagaggagttgagaagaaatatgcgttctcagcccctgacctccccagagagtaggactgccagaggaggaagtcagatggatgtgctacagaggaaactccgagaggtgtccacaaagttccagcttttccagaagccagctaacttcgagcagcgcatgctggactgcaagcgtgtgctggatggcgtgaaagcagaacttcacgttctggatgtgaaggacgtagaccctgacgtcatacagacgcacctggacaagtgtatgaaactgtataaaactttgagtgaagtcaaacttgaagtggaaactgtgattaaaacaggaagacatattgtccagaaacagcaaacggacaacccaaaagggatggatgagcagctgacttccctgaaggttctttacaatgacctgggcgcacaggtgacagaaggaaaacaggatctggaaagagcatcacagttggcccggaaaatgaagaaagaggctgcttctctctctgaatggctttctgctactgaaactgaattggtacagaagtccacttcagaaggtctgcttggtgacttggatacagaaatttcctgggctaaaaatgttctgaaggatctggaaaagagaaaagctgatttaaataccatcacagagagtagtgctgccctgcaaaacttgattgagggcagtgagcctattttagaagagaggctctgcgtccttaacgctgggtggagccgagttcgtacctggactgaagattggtgcaataccttgatgaaccatcagaaccagctagaaatatttgatgggaacgtggctcacataagtacctggctttatcaagctgaagctctattggatgaaattgaaaagaaaccaacaagtaaacaggaagaaattgtgaagcgtttagtatctgagctggatgatgccaacctccaggttgaaaatgtccgcgatcaagcccttattttgatgaatgcccgtggaagctcaagcagggagcttgtagaaccaaagttagctgagctgaataggaactttgaaaaggtgtctcaacatatcaaaagtgccaaattgctaattgctcaggaaccattataccaatgtttggtcaccactgaaacatttgaaactggtgtgcctttctctgacttggaaaaattagaaaatgacatagaaaatatgttaaaatttgtggaaaaacacttggaatccagtgatgaagatgaaaagatggatgaggagagtgcccagattgaggaagttctacaaagaggagaagaaatgttacatcaacctatggaagataataaaaaagaaaagatccgtttgcaattattacttttgcatactagatacaacaaaattaaggcaatccctattcaacagaggaaaatgggtcaacttgcttctggaattagatcatcacttcttcctacagattatctggttgaaattaacaaaattttactttgcatggatgatgttgaattatcgcttaatgttccagagctcaacactgctatttacgaagacttctcttttcaggaagactctctgaagaatatcaaagaccaactggacaaacttggagagcagattgcagtcattcatgaaaaacagccagatgtcatccttgaagcctctggacctgaagccattcagatcagagatacacttactcagctgaatgcaaaatgggacagaattaatagaatgtacagtgatcggaaaggttgttttgacagggcaatggaagaatggagacagttccattgtgaccttaatgacctcacacagtggataacagaggctgaagaattactggttgatacctgtgctccaggtggcagcctggacttagagaaagccaggatacatcagcaggaacttgaggtgggcatcagcagccaccagcccagttttgcagcactaaaccgaactggggatgggattgtgcagaaactctcccaggcagatggaagcttcttgaaagaaaaactggcaggtttaaaccaacgctgggatgcaattgttgcagaagtgaaggataggcagccaaggctaaaaggagaaagtaagcaggtgatgaagtacaggcatcagctagatgagattatctgttggttaacaaaggctgagcatgctatgcaaaagagatcaaccaccgaattgggagaaaacctgcaagaattaagagacttaactcaagaaatggaagtacatgctgaaaaactcaaatggctgaatagaactgaattggagatgctttcagataaaagtctgagtttacctgaaagggataaaatttcagaaagcttaaggactgtaaatatgacatggaataagatttgcagagaggtgcctaccaccctgaaggaatgcatccaggagcccagttctgtttcacagacaaggattgctgctcatcctaatgtccaaaaggtggtgctagtatcatctgcgtcagatattcctgttcagtctcatcgtacttcggaaatttcaattcctgctgatcttgataaaactataacagaactagccgactggctggtattaatcgaccagatgctgaagtccaacattgtcactgttggggatgtagaagagatcaataagaccgtttcccgaatgaaaattacaaaggctgacttagaacagcgccatcctcagctggattatgtttttacattggcacagaatttgaaaaataaagcttccagttcagatatgagaacagcaattacagaaaaattggaaagggtcaagaaccagtgggatggcacccagcatggcgttgagctaagacagcagcagcttgaggacatgattattgacagtcttcagtgggatgaccatagggaggagactgaagaactgatgagaaaatatgaggctcgactctatattcttcagcaagcccgacgggatccactcaccaaacaaatttctgataaccaaatactgcttcaagaactgggtcctggagatggtatcgtcatggcgttcgataacgtcctgcagaaactcctggaggaatatgggagtgatgacacaaggaatgtgaaagaaaccacagagtacttaaaaacatcatggatcaatctcaaacaaagtattgctgacagacagaacgccttggaggctgagtggaggacggtgcaggcctctcgcagagatctggaaaacttcctgaagtggatccaagaagcagagaccacagtgaatgtgcttgtggatgcctctcatcgggagaatgctcttcaggatagtatcttggccagggaactcaaacagcagatgcaggacatccaggcagaaattgatgcccacaatgacatatttaaaagcattgacggaaacaggcagaagatggtaaaagctttgggaaattctgaagaggctactatgcttcaacatcgactggatgatatgaaccaaagatggaatgacttaaaagcaaaatctgctagcatcagggcccatttggaggccagcgctgagaagtggaacaggttgctgatgtccttagaagaactgatcaaatggctgaatatgaaagatgaagagcttaagaaacaaatgcctattggaggagatgttccagccttacagctccagtatgaccattgtaaggccctgagacgggagttaaaggagaaagaatattctgtcctgaatgctgtcgaccaggcccgagttttcttggctgatcagccaattgaggcccctgaagagccaagaagaaacctacaatcaaaaacagaattaactcctgaggagagagcccaaaagattgccaaagccatgcgcaaacagtcttctgaagtcaaagaaaaatgggaaagtctaaatgctgtaactagcaattggcaaaagcaagtggacaaggcattggagaaactcagagacctgcagggagctatggatgacctggacgctgacatgaaggaggcagagtccgtgcggaatggctggaagcccgtgggagacttactcattgactcgctgcaggatcacattgaaaaaatcatggcatttagagaagaaattgcaccaatcaactttaaagttaaaacggtgaatgatttatccagtcagctgtctccacttgacctgcatccctctctaaagatgtctcgccagctagatgaccttaatatgcgatggaaacttttacaggtttctgtggatgatcgccttaaacagcttcaggaagcccacagagattttggaccatcctctcagcattttctctctacgtcagtccagctgccgtggcaaagatccatttcacataataaagtgccctattacatcaaccatcaaacacagaccacctgttgggaccatcctaaaatgaccgaactctttcaatcccttgctgacctgaataatgtacgtttttctgcctaccgtacagcaatcaaaatccgaagactacaaaaagcactatgtttggatctcttagagttgagtacaacaaatgaaattttcaaacagcacaagttgaaccaaaatgaccagctcctcagtgttccagatgtcatcaactgtctgacaacaacttatgatggacttgagcaaatgcataaggacctggtcaacgttccactctgtgttgatatgtgtctcaattggttgctcaatgtctatgacacgggtcgaactggaaaaattagagtgcagagtctgaagattggattaatgtctctctccaaaggtctcttggaagaaaaatacagatatctctttaaggaagttgcagggccaacagaaatgtgtgaccagaggcagctgggcctgttacttcatgatgccatccagatcccccggcagctaggtgaagtagcagcttttggaggcagtaatattgagcctagtgttcgcagctgcttccaacagaataacaataaaccagaaataagtgtgaaagagtttatagattggatgcatttggaaccacagtccatggtttggctcccagttttacatcgagtggcagcagcggagactgcaaaacatcaggccaaatgcaacatctgtaaagaatgtccaattgtcgggttcaggtatagaagccttaagcattttaactatgatgtctgccagagttgtttcttttcgggtcgaacagcaaaaggtcacaaattacattacccaatggtggaatattgtatacctacaacatctggggaagatgtacgagacttcacaaaggtacttaagaacaagttcaggtcgaagaagtactttgccaaacaccctcgacttggttacctgcctgtccagacagttcttgaaggtgacaacttagagactcctatcacactcatcagtatgtggccagagcactatgacccctcacaatctcctcaactgtttcatgatgacacccattcaagaatagaacaatatgccacacgactggcccagatggaaaggactaatgggtcttttctcactgatagcagctccaccacaggaagtgtggaagacgagcacgccctcatccagcagtattgccaaacactcggaggagagtccccagtgagccagccgcagagcccagctcagatcctgaagtcagtagagagggaagaacgtggagaactggagaggatcattgctgacctggaggaagaacaaagaaatctacaggtggagtatgagcagctgaaggaccagcacctccgaagggggctccctgtcggttcaccgccagagtcgattatatctccccatcacacgtctgaggattcagaacttatagcagaagcaaaactcctcaggcagcacaaaggtcggctggaggctaggatgcagattttagaagatcacaataaacagctggagtctcagctccaccgcctccgacagctgctggagcagcctgaatctgattcccgaatcaatggtgtttccccatgggcttctcctcagcattctgcactgagctactcgcttgatccagatgcctccggcccacagttccaccaggcagcgggagaggacctgctggccccaccgcacgacaccagcacggatctcacggaggtcatggagcagattcacagcacgtttccatcttgctgcccaaatgttcccagcaggccacaggcaatgtgaagtattcatccggccaaccaatgtttcctgacgtacagtgttgcccttttcagcaaatgccaattccaagttccattaaatcagaagctccatggctccttggcccacgatgttgagtgctgactgtgtgttctactgaaagagtaaaacactgactatccaaagagaaatggatattttgtttttataataaccatatattattgttttcttcttccctttctatgcaagtgtaaattaatgaacagagaggtatttggaaatggtaatacatttgtcacggatttgtataatgtatacagcattgggaaagtgggtgggggctttctaatatgataccgtctttttaataactatgacaaagcttacataagaattagaagaccactttacatttttacattccttctgctgttcatattaaccttgcacaattacttcattttttctttgactcttttaccacaatgttttggttatttataatttatcagccatatgtttatcagccatataaccaactagatcccaaatagatccatgtatttgtttccgtgatttggccacattaataaattcataaatttcaatcaaatatcttatatatacacacatatggtttaagctacagccctgtgtatgccgtttaactttatttgacgttgcccacttacttctttgctgaccacttggataaccgtaataaaaatcctataagcctaaatggcatttcttttgggatatttttcctgcattttattccctttttatataagtaggaattaattatttattttatgtcttaatctatttgataaagaagactacattataataatctcaaagatcatattaccaaaggttgcccacttgagcatattttcattttgacacagaaacaaaatttagtacaacctttcctagttcccatgtcttgattttcatcattacatgcacagcagacctttacctattgtgataccagaacacatcattgtctttggttcccttcaaagagaattttattgttgttttgtattttcaagtccttaatagttcttgaaactcctagttgttttcttgttgaaagcagacacacatttagtgcacggcttattttacctttcgggtgaaagatcagatgtttttatacccttcacttgatcaatatatttggaaagaatgtttatcaaaagtctatgtcactgcttctacagaagaatgaaattaatgcttaggtgatggtacctccacctacatctttttgagtgcattcaattatgtattttggtttagcttctgatttaacatttaattgattcagtttaaacatgttacttaattagcaaatgtagaggaaccaaaaaaaggtgaaaataatatgttttgattcaaacctaaagacataaaaacataaagacattttaactttgggttctctttagctgggatctggccagaaggaggcttaaagttagaaattgctattattttagaataggttgggtgggttggggggcaagggtgtctatttgcagcagagatattttgaaaagaagaaaattgttttatataaaaaggaaagccatgaccacctttctacctcagatccatcttcatccattgcattggaaactgctttatgctgctgcagtctgcaaagtctagagcttttatcaggccatgtcatacccaagaaagcacctatttaaagaaaaaacaattccctgagctctcaactccaagttgtagatttggtgtcttccttgttcttactttaaaaagtcatgtgttaattttttttctgcctgtatttgtatgcaaaatgtcctctatctgctattaaagaaaagctacgtaaaacactacattgtaaccttctaagtaataataaataaaaagaaatatattgcagtaacaatgggaagtaagtatgtagttcttttgaaatatgtggtaaagaactaatcacagactatcatctaatctggttacatattgtatttttcatcctgaataaaagtaattttaacactaaaaaaaatctatgtcgggtgcggagaaagaggtaatgaaatggcaggaattcagatatcagcttatcatacc

SEQ ID NO: 1600 - protein, 3433 aa, Homo sapien
MAKYGEHEASPDNGQNEFSDIIKSRSDEHNDVQKKTFTKWINARFSKSGKPPINDMFTDLKDGRKLLDLLEGLTGTSLPKERGSTRVHALNNVNRVLQVLHQNNVELVNIGGTDIVDGNHKLTLGLLWSIILHWQVKDVMKDVMSDLQQTNSEKILLSWVRQTTRPYSQVNVLNFTTSWTDGLAFNAVLHRHKPDLFSWDKVVKMSPIERLEHAFSKAQTYLGIEKLLDPEDVAVQLPDKKSIIMYLTSLFEVLPQQVTIDAIREVETLPRKYKKECEEEAINIQSTAPEEEHESPRAETPSTVTEVDMDLDSYQIALEEVLTWLLSAEDTFQEQDDISDDVEEVKDQFATHEAFMMELTAHQSSVGSVLQAGNQLITQGTLSDEEEFEIQEQMTLLNARWEALRVESMDRQSRLHDVLMELQKKQLQQLSAWLTLTEERIQKMETCPLDDDVKSLQKLLEEHKSLQSDLEAEQVKVNSLTHMVVIVDENSGESATAILEDQLQKLGERWTAVCRWTEERWNRLQEINILWQELLEEQCLLKAWLTEKEEALNKVQTSNFKDQKELSVSVRRLAILKEDMEMKRQTLDQLSEIGQDVGQLLDNSKASKKINSDSEELTQRWDSLVQRLEDSSNQVTQAVAKLGMSQIPQKDLLETVRVREQAITKKSKQELPPPPPPKKRQIHVDIEAKKKFDAISAELLNWILKWKTAIQTTEIKEYMKMQDTSEMKKKLKALEKEQRERIPRADELNQTGQILVEQMGKEGLPTEEIKNVLEKVSSEWKNVSQHLEDLERKIQLQEDINAYFKQLDELEKVIKTKEEWVKHTSISESSRQSLPSLKDSCQRELTNLLGLHPKIEMARASCSALMSQPSAPDFVQRGFDSFLGRYQAVQEAVEDRQQHLENELKGQPGHAYLETLKTLKDVLNDSENKAQVSLNVLNDLAKVEKALQEKKTLDEILENQKPALHKLAEETKALEKNVHPDVEKLYKQEFDDVQGKWNKLKVLVSKDLHLLEEIALTLRAFEADSTVIEKWMDGVKDFLMKQQAAQGDDAGLQRQLDQCSAFVNEIETIESSLKNMKEIETNLRSGPVAGIKTWVQTRLGDYQTQLEKLSKEIATQKSRLSESQEKAANLKKDLAEMQEWMTQAEEEYLERDFEYKSPEELESAVEEMKRAKEDVLQKEVRVKILKDNIKLLAAKVPSGGQELTSELNVVLENYQLLCNRIRGKCHTLEEVWSCWIELLHYLDLETTWLNTLEERMKSTEVLPEKTDAVNEALESLESVLRHPADNRTQIRELGQTLIDGGILDDIISEKLEAFNSRYEDLSHLAESKQISLEKQLQVLRETDQMLQVLQESLGELDKQLTTYLTDRIDAFQVPQEAQKIQAEISAHELTLEELRRNMRSQPLTSPESRTARGGSQMDVLQRKLREVSTKFQLFQKPANFEQRMLDCKRVLDGVKAELHVLDVKDVDPDVIQTHLDKCMKLYKTLSEVKLEVETVIKTGRHIVQKQQTDNPKGMDEQLTSLKVLYNDLGAQVTEGKQDLERASQLARKMKKEAASLSEWLSATETELVQKSTSEGLLGDLDTEISWAKNVLKDLEKRKADLNTITESSAALQNLIEGSEPILEERLCVLNAGWSRVRTWTEDWCNTLMNHQNQLEIFDGNVAHISTWLYQAEALLDEIEKKPTSKQEEIVKRLVSELDDANLQVENVRDQALILMNARGSSSRELVEPKLAELNRNFEKVSQHIKSAKLLIAQEPLYQCLVTTETFETGVPFSDLEKLENDIENMLKFVEKHLESSDEDEKMDEESAQIEEVLQRGEEMLHQPMEDNKKEKIRLQLLLLHTRYNKIKAIPIQQRKMGQLASGIRSSLLPTDYLVEINKILLCMDDVELSLNVPELNTAIYEDFSFQEDSLKNIKDQLDKLGEQIAVIHEKQPDVILEASGPEAIQIRDTLTQLNAKWDRINRMYSDRKGCFDRAMEEWRQFHCDLNDLTQWITEAEELLVDTCAPGGSLDLEKARIHQQELEVGISSHQPSFAALNRTGDGIVQKLSQADGSFLKEKLAGLNQRWDAIVAEVKDRQPRLKGESKQVMKYRHQLDEIICWLTKAEHAMQKRSTTELGENLQELRDLTQEMEVHAEKLKWLNRTELEMLSDKSLSLPERDKISESLRTVNMTWNKICREVPTTLKECIQEPSSVSQTRIAAHPNVQKVVLVSSASDIPVQSHRTSEISIPADLDKTITELADWLVLIDQMLKSNIVTVGDVEEINKTVSRMKITKADLEQRHPQLDYVFTLAQNLKNKASSSDMRTAITEKLERVKNQWDGTQHGVELRQQQLEDMIIDSLQWDDHREETEELMRKYEARLYILQQARRDPLTKQISDNQILLQELGPGDGIVMAFDNVLQKLLEEYGSDDTRNVKETTEYLKTSWINLKQSIADRQNALEAEWRTVQASRRDLENFLKWIQEAETTVNVLVDASHRENALQDSILARELKQQMQDIQAEIDAHNDIFKSIDGNRQKMVKALGNSEEATMLQHRLDDMNQRWNDLKAKSASIRAHLEASAEKWNRLLMSLEELIKWLNMKDEELKKQMPIGGDVPALQLQYDHCKALRRELKEKEYSVLNAVDQARVFLADQPIEAPEEPRRNLQSKTELTPEERAQKIAKAMRKQSSEVKEKWESLNAVTSNWQKQVDKALEKLRDLQGAMDDLDADMKEAESVRNGWKPVGDLLIDSLQDHIEKIMAFREEIAPINFKVKTVNDLSSQLSPLDLHPSLKMSRQLDDLNMRWKLLQVSVDDRLKQLQEAHRDFGPSSQHFLSTSVQLPWQRSISHNKVPYYINHQTQTTCWDHPKMTELFQSLADLNNVRFSAYRTAIKIRRLQKALCLDLLELSTTNEIFKQHKLNQNDQLLSVPDVINCLTTTYDGLEQMHKDLVNVPLCVDMCLNWLLNVYDTGRTGKIRVQSLKIGLMSLSKGLLEEKYRYLFKEVAGPTEMCDQRQLGLLLHDAIQIPRQLGEVAAFGGSNIEPSVRSCFQQNNNKPEISVKEFIDWMHLEPQSMVWLPVLHRVAAAETAKHQAKCNICKECPIVGFRYRSLKHFNYDVCQSCFFSGRTAKGHKLHYPMVEYCIPTTSGEDVRDFTKVLKNKFRSKKYFAKHPRLGYLPVQTVLEGDNLETPITLISMWPEHYDPSQSPQLFHDDTHSRIEQYATRLAQMERTNGSFLTDSSSTTGSVEDEHALIQQYCQTLGGESPVSQPQSPAQILKSVEREERGELERIIADLEEEQRNLQVEYEQLKDQHLRRGLPVGSPPESIISPHHTSEDSELIAEAKLLRQHKGRLEARMQILEDHNKQLESQLHRLRQLLEQPESDSRINGVSPWASPQHSALSYSLDPDASGPQFHQAAGEDLLAPPHDTSTDLTEVMEQIHSTFPSCCPNVPSRPQAM

SEQ ID NO: 1601 - DNA, 15059 bp, Homo sapien
  Unsure 9210-9228: Unknown base
cgcccggccccctcccccggcgccggccacgggaggcggtgatgcgggcgcgggcggcctcggctgcgccgagagcggagacacaggctcaagatggcagattccgactgaggctgggggggccgagctcgcgcgccgctttcccgtccccgttgccatgaaccgcggacaccccggccccgatggcccccgtgtacgaaggtatggcctcacatgtgcaagttttctcccctcacacccttcaatcaagtgccttctgtagtgtgaagaaactgaaaatagagccgagttccaactgggacatgactgggtacggctcccacagcaaagtgtatagccagagcaagaacatccccctgtcgcagccagccaccacaaccgtcagcacctccttgccggtcccaaacccaagcctaccttacgagcagaccatcgtcttcccaggaagcaccgggcacatcgtggtcacctcagcaagcagcacttctgtcaccgggcaagtcctcggcggaccacacaacctaatgcgtcgaagcactgtgagcctccttgatacctaccaaaaatgtggactcaagcgtaagagcgaggagatcgagaacacaagcagcgtgcagatcatcgaggagcatccacccatgattcagaataatgcaagcggggccactgtcgccactgccaccacgtctactgccacctccaaaaacagcggctccaacagcgagggcgactatcagctggtgcagcatgaggtgctgtgctccatgaccaacacctacgaggtcttagagttcttgggccgagggacgtttgggcaagtggtcaagtgctggaaacggggcaccaatgagatcgtagccatcaagatcctgaagaaccacccatcctatgcccgacaaggtcagattgaagtgagcatcctggcccggttgagcacggagagtgccgatgactataacttcgtccgggcctacgaatgcttccagcacaagaaccacacgtgcttggtcttcgagatgttggagcagaacctctatgactttctgaagcaaaacaagtttagccccttgcccctcaaatacattcgcccagttctccagcaggtagccacagccctgatgaaactcaaaagcctaggtcttatccacgctgacctcaaaccagaaaacatcatgctggtggatccatctagacaaccatacagagtcaaggtcatcgactttggttcagccagccacgtctccaaggctgtgtgctccacctacttgcagtccagatattacagggcccctgagatcatccttggtttaccattttgtgaggcaattgacatgtggtccctgggctgtgttattgcagaattgttcctgggttggccgttatatccaggagcttcggagtatgatcagattcggtatatttcacaaacacagggtttgcctgctgaatatttattaagcgccgggacaaagacaactaggtttttcaaccgtgacacggactcaccatatcctttgtggagactgaagacaccagatgaccatgaagcagagacagggattaagtcaaaagaagcaagaaagtacattttcaactgtttagatgatatggcccaggtgaacatgacgacagatttggaagggagcgacatgttggtagaaaaggctgaccggcgggagttcattgacctgttgaagaagatgctgaccattgatgctgacaagagaatcactccaatcgaaaccctgaaccatccctttgtcaccatgacacacttactcgattttccccacagcacacacgtcaaatcatgtttccagaacatggagatctgcaagcgtcgggtgaatatgtatgacacggtgaaccagagcaaaacccctttcatcacgcacgtggcccccagcacgtccaccaacctgaccatgacctttaacaaccagctgaccactgtccacaaccagccctcagcggcatccatggctgcagtggcccagcggagcatgcccctgcagacaggaacagcccagatttgtgcccggcctgacccgttccagcaagctctcatcgtgtgtccccccggcttccaaggcttgcaggcctctccctctaagcacgctggctactcggtgcgaatggaaaatgcagttcccatcgtcactcaagccccaggagctcagcctcttcagatccaaccaggtctgcttgcccagcaggcttggccaagtgggacccagcagatcctgcttcccccagcatggcagcaactgactggagtggccacccacacatcagtgcagcatgccaccgtgattcccgagaccatggcaggcacccagcagctggcggactggagaaatacgcatgctcacggaagccattataatcccatcatgcagcagcctgcactattgaccggtcatgtgacccttccagcagcacagcccttaaatgtgggtgtggcccacgtgatgcggcagcagccaaccagcaccacctcctcccggaagagtaagcagcaccagtcatctgtgagaaatgtctccacctgtgaggtgtcctcctctcaggccatcagctccccacagcgatccaagcgtgtcaaggagaacacacctccccgctgtgccatggtgcacagtagcccggcctgcagcacctcggtcacctgtgggtggggcgacgtggcctccagcaccacccgggaacggcagcggcagacaattgtcattcccgacactcccagccccacggtcagcgtcatcaccatcagcagtgacacggacgaggaggaggaacagaaacacgcccccaccagcactgtctccaagcaaagaaaaaacgtcatcagctgtgtcacagtccacgactccccctactccgactcctccagcaacaccagcccctactccgtgcagcagcgtgctgggcacaacaatgccaatgcctttgacaccaaggggagcctggagaatcactgcacggggaacccccgaaccatcatcgtgccacccctgaaaacccaggccagcgaagtattggtggagtgtgatagcctggtgccagtcaacaccagtcaccactcgtcctcctacaagtccaagtcctccagcaacgtgacctccaccagcggtcactcttcagggagctcatctggagccatcacctaccggcagcagcggccgggcccccacttccagcagcagcagccactcaatctcagccaggctcagcagcacatcaccacggaccgcactgggagccaccgaaggcagcaggcctacatcactcccaccatggcccaggctccgtactccttcccgcacaacagccccagccacggcactgtgcacccgcatctggctgcagccgctgccgctgcccacctccccacccagccccacctctacacctacactgcgccggcggccctgggctccaccggcaccgtggcccacctggtggcctcgcaaggctctgcgcgccacaccgtgcagcacactgcctacccagccagcatcgtccaccaggtccccgtgagcatgggcccccgggtcctgccctcgcccaccatccacccgagtcagtatccagcccaatttgcccaccagacctacatcagcgcctcgccagcctccaccgtctacactggatacccactgagccccgccaaggtcaaccagtacccttacatataaacactggaggggagggtgggagggagggagggagagaatggcccgagggaggagggagagaaggagggaggcgctcctgggaccgtgggcgctggccttttatactgaagatgccgcacacaaacaatgcaaacggggcaggtgcggggggggggggggcagagggcagggggacggggtcgggacaccagtgaaacttgaaccgggaagtgggaggacgtagagcagagaagagaacatttttaaaaggaagggattaaagagggtgggaaatctatggtttttatttaaaaaaggaaaagggaaaaaaaaaaaggtcaataacaaaaaacccagctcaagaacccattctacgccaaactggaaaggagaagagagcaacaggaagattccagaaacggggggccccagtttttgaagaactttatgaacttttcaaagattattttcatatggcagcaagtgatacggaagactgctgtcagggacacctgatatggaaatcaaatagatttttaattaattgaacataagatttagggatttttccagaactcgaaagggtcaacagccctccagaatgtcgggctgcagcctgaggaggctgatgtttggagctggtgtgggattggcgaagcccagtccgggctccctagtcaggaaagacgggggacggccaggctgctggaaggcccccgggggcgcggggcgagttttctttttctgagcactctggataaatccctaagcaacgttgtttctcaaatgtcattaataatgtgtgttgcaaactttaggtttttttcttttctgaaaatgtattttctctttgaatccacccctagtcgcgtagcgtagggctagcggtcgtcacagacaccctagtagaatgtagcactcagcacccttgtctcctaccttgtgttcaactccaatgataccaatagaatattcctcaatgtaattgcacaaaaaaaagcgatataacataggcatgtaaccaatgtggcggtgcaggtgtgcgggtgagcgagcacgtgtgggtgtgcacgcgccgccctccccgcgtggccctcggcgccgccaccctagctggcgcagtcttgacactgcatccttccctcctagtgccttaccgagcgacagacgcggcgtgagggtttacttccactggtactccaagaaactgaggctagtcagacacaatctcagctcttctgttgtgctgttgtaacagtttacgctggccttttttttttctttttctttttctttttaaaatgttaatgcccgttgtctttcctgggctgtttgctagcggaaggatgccagggaagccagcaggagctaggagagagtccgtggatctcgaaagaaatatgggagacagatgcccggcgggtgcgtctggagatggggacggcgggagttgagttgtggcagtagttgagttgtaatttgtgggcggaggcccagagagactccccacccttcacccctgccccactctgtccccagttccgccatttgtgaggccagaggtttccggactgttggcctcgccaggcagccgtctcccgccccaggcggcatcccccagtccctcccgcctccacgagagcctggagctctcagcctcgcccggggctccactctctcctccggctccctgggctgttttgctctaacgatcttgccagatccctccctctgtagacaaccaccaacctctgtttgctgttgaattctctcctcacattacccaggtctgctcaagacatgattttggttttggtttctgagggttctagtgggcagaaggttggagggacacttatgagggtggccgggggtctgacgctgcactttggaaaaactcacacagttgaatttccaaagaaatctgccctttgccctctttgcacctttgatacattctggaagttttctcaggctttggacacttctggggatggaggtgtggagaagtggggagttccctctcttcatagtaaataactctgaaatatgtgaatgtgaatggcaggagaatctggccaaggatggggccgaaaagggtggttctaattgtttgcttctgatgttgagtctttagctgaccccacaggcaggtttccaaggtgcaaagagatctttcccgagtcagcggccccatcctcatcctccctccctttacttcctcactgtgcagtctccctcaaggatctactgtgaaaggtgtgtttgtagtgatatccaacctaactcagtaacgaagtcgttacttagctcttagctgtgaaataactctggaaacttccccaccccaaccataaattcttacttataaagaaacaggtccccaaactggaaacagcttagtccaggcctcagcgagaaggaaggacaccatgactgctccatgctgggcacagccgggcagtcttgccaagtgcctgctggaggctgtgccggcaagaggcctgcagcaaggagattcccttccctcgggccattatcaatactgtctttatctggaggtggggaagcgcagccctctgagacagcaggacaatggtcagttcagagagggtgagggcagcaaacgcttcagaggacacagaagccagaggacccccccccgccccacagctgggtcagcctggaaaatccatctattagggactttttggcagccagatggcagcaatagcccattaggtctcatcccgagttccaagtcttggctgcaaatgagcctcagttcgccttactggagagcacccccagattcctgggcacagttcatttccagccctttctagatctgatcttttagggggaaagacagcttaaaatgttcttttcattttaaagaaaattattctgtctgcttaagttggaggctacttactctttcacctgacattttctttccttttattcttccagatcaggaatgaaatttccatgctgctcataaagataatattattgtactaattatttttattaccattgtaattatgatcattatgttgatattttagtcagggttttaaatgcacatttattccaagtatctttgtgttttctctttaatatttaaacttattctctctgtgagtatataagtagactggagggacatccagatgtccagttttgtcaggccaaaaaaaaaaggaaagacttaggaagtaggaaaattgtttctgtcatctctatcccaacaagagacgtcaagaaagatccaccacagaacaaaagtttaaagaagaatcaaagccttgattgggcttctgacaacatggtcaccatcaaggttgtcattttctagatcccagaggcctgggatgcgacgtcaggtggcatctcatgggctcggggaatgtcgagtcactgactgtccagcccttagccagcttctctcccacatcctcagagctctcctgtgcttctgaaatctgttaactaaatctttggcttgcctctggtatttaagcaagaaaattccctcccagaggtgaccccatccgcttccccacaatccatccttttgccatcggcgcacctggggcgtggcttaggttcttcaatgcagggacatttgccccctcccagaagctgctgggcacagtgaggtggcgtaagagtgactggcaggtggtaccttccccaggaaatttcaccacaccacccagttcctcagcctgccccctccccctgtgatgcatgcccccagcacccaattctagccagctggaagtgggtggagggacagcaggaggccagagaaaccctgaacaaagctgggcggctgctcaggcatcacaggctgcaccccctctgaaagcatccccactgggctccggccacatcttcagtgcactgtgctgtgtgcgctgggtgctcacacgctgtccccagacccacaaagtgctaggccccagttgaagaaaggggtgaaatagccagcttcaccgaagggaagggaagggaagtattgggcgatgccagccccacagacgctcagcaaacattagtgcacattctcctagtcctcacccaatggcctcctctacccccatgcatggagctgccacatcagaagccccaagagaagctccctgcaggagaggccagctccctggatgcccaattgcatacctggccgaatctgccattgagtcaccttagcaaataggctgctgtcactaggaccaagctctcaagcagagggatgccaacctagtccttacttagcccacgaatcatctagagcatcctctagtcttttgtgggctccctccttcccatttgaagagacattgttcagaggaagaggggaagatttgaaatgtcaggtcacggaggagtgtttaactggagcctggtgaaccgcagggcaatttgcttctgctcactgggttctgactggcccgtctggacgtgggcccccatgtctctgtgcttagggcctcttcatgatgttttggatgtttccaagggaagtgggtgagcagatcaaggggtgggagagtcgaggcttgattccagttaatactgtgaagtggagcgtgcggtcagtggaattcagaggaaaaagaagggttggagcaaagcggcattcatctcctggactgttagcctttctagtcttcctggtggctgaggtgttcacgggctgggggagccagctgacctttgtcctcttcaacctagaagactcagcccgcccagacaccaacgtgtgagacggatggacatcaggaagggaaggggagattagcccaactgctgacagaacgatttcccttggttggaccttgggaatggcaaacactcatattggaacaagcttggggtggaagatttaggccgtgtgagcgtgtgtgagtgagtggaacaaactttcttggaaactggagggaggagatgaggaggcttcgggaagtattactgatggctcatggttgagagagcgacgtggggacccagctcgccccagcttttgtcccaggttctctttgtctgatgctgagggcagggtggggtgtgggaccaccactcttgttggcctgtcaagtagaccctaggacagaaaatggaaagaaggaaatggctcggtgctctcaactagcagagagaattgaggagaggtaagggttccttctgcaggccagcctgggactccacagcgccagcaggagtgacttggccacaagacattccagccccagggactttgcaggcttcattccctgtctgtgtcttttccttctggtgtgttttacagacttctgatggggaagcttcaaacttgagcaggccagagatgtccttaccaaattggaaaggaaggtgaaactgttcctttctttagccaaagaacccttctcaaagacgcctccagaaatggacaaaatggccttcccttcgttcctttccaggcaataatgacatcattagtgatgcaattctatttgtctttctctttcctctctgtccnnnnnnnnnnnnnnnnnnntgcatttatttcaaaactgtgctattcttttaagaggagtggaggtgaccccttcgatgctgctgctatcgggagacaaggtgccataccaatacgtgggcttgactaatcccaggccaccatgggagagagcaaagcagggctgccaggagttcagttgcatcaagggcgtagagcacgcgggggctgggctcggaatagcagtacttttccactttgatgccttagaactctcacttctcatctccacagaccagactcagtaaaatctcaggccactagagaatggaaggcggtgaaacaggatttaaatgcaaaaaaaacctattggaggcttttggcaccgtggctcactagagggacccagcatagtagaggtttctcttgttgcagcttctgaaaagttcaaaaaagaactccaggccgttcttccctcaaacccagtgagagtttgcagagaagtgccccctgcagggctcccgtcccagaacaccagcaccagagagggtcttcccgatgccccccgctggacttgcccaagcctctgggagcccctcatctcagatccctgtgttgaacatgacactgactgtcccttatttgttaaaatttgcaatatctctcaagtaaataatagccaacatttgttgaatgctttcatgactcccgggctaaggcctttatgagcgttgtctcaaggggccccaacagccatcccacagggagggggataacagcccccatttatagataagggagctgaccggatgctctgagaagtggcaggtgttgaaggaaggataaagcagtgatgggccagaatccccaaggttcccttttttgttcatcaggcccttcctgagatgtgatttttaatcttttaactttttttaattaatagcaatgcgtggcctcatatttctatgaaccatttagtgatactcccgcttcctgcatgccacacactgtgctgggaattgctcatgggttgtcctgtttcatcttctccgtagccctgtgagatcggcaatattagtccccctacagccaaggaaactgcccagagccacacaactcttgaggggcgaggagggcttgaacctgagtctgcccagctccagaactgagcttgcagccattagccacagctgtctcctgcatgtctgagcaaagaaaggcctttacacagcatcaccctgtgccatcccatgcaccgtgggactcagctaaaggactgtgcaaagagggggctcctgagttggatttaggcaaaaggggcagaattcgtttgatttttagagaaaatctctggagagtttcttttgattcatagaattccttttagatttctttccagcataccaactagctttagtagtgctgctacaaccagctcttataagtaagagtgaaaaagtattcttttcttctttaaaaaataagtttttcttgcttatagttaattctagaaaggcaatactaaaggtatatatttttttcaaaatgctattttttactgcacttgataattatcctgacagctctgatctctgtaatagattcactcttcagctctgggcagaaccagaggcagggttcacaccaaatttgtaaataccatatgtgggtctggtgtccaggaacttttttctttctgttaaaaaaaagaacaaaaaaagaacaaaaaaaaagaagtagaggtggaagaaagacaagacttagaggaacaaaagaatgttttcttttgagatactcttctcaaagaaatagcaacaattgtataaacaggaaaaccagccagctttcatgataaaaggaaggcgtgtctcttgccctggtatgagattaacagaaatacagatgcatttttattttgattgaaagatggtgagaatgtagaaatgcttaggactagatttttaattttttaaaataactattatcatttattatgaaatatttgttcagttgttttgagtgggtttcttgtcccttttttcatttaaaaccttctttgttgactggctccaggcttgtttgcctaaattcttaggtagtttacacaagttctagaatcttttagaactttaactccattggaagcaaacctaactaatcggagtttgagatcctggttggtttcaataggtattctggaattctggcagaacacctaaagattttttttttttttagaaggttttagatacattatcttacacaaactgtgacctaatggcaataattacctcaaatgtgggcattcatcctggttttagccttttttgaaatcatgtagccagcttgatcttggaatttaaagactatgaattctctgtgggctgaaaataatgattacttcatacccccggtcatcgttgcttaagtgaattctgaaaatagctcatctttacaacaaaaattaaaccaaggaagagattattctttgtgtgttgtactcaaatgcgatgttcaaatgcacatgttaagtatatatgtttttagctactgtaaaatgctgttagccttctaagctatcaaaacagtcacattttaaatgagtaaactaaacaattgactgtggatacttaagcatatttctggctacgttttatagttaaagtgttttatagtttacatttagactggtactttttaaagaaaagttctgtttataactgacatccgcaaaccccagtgaatgcctcttagttggaggttgtgtctcccccaaggcaagtgtgttgtcccagactcttctgtagtccagcatgcgcacttccctctggattattactttccacgtgaactcaagagaacatgaaaggcaatccagatggagggaaaaggtgtgagtccgcagcccgggccagatgcgaaggtctcatgcgtgtcgtctaaacacttgtcttcaaggccttctctctgacatcttggaagagtcattgagaacagataacctggttcattgatttttgtcttgatttgaatatttaacttattaatagatccactgatttccaggcaccaggcagtagaagagactgggattcaggtgaccatgaaggcacagctgctacttctgggccgggggtgatattttgatcagcgttttgtaggggaggaccatatacccctattcccatggtcgctggctgggttttccatatatctgctgtcatttattcgttttccccttaaaagcaaaatcaatgtaaaaggctatgtttacgttttactcattgtccagcttagactcaaagtctagttcggtgggagggggaccttagcatcctctcagagatggtcagggctgagcaggaggaggcagagacagaggggcagctcagcctggtccattgagacccactctaaacagacatcatatttggaacaagaagatgcttcgagacaggaatgggccccactgtcatgcagaaacagactgggggaatggcagtttccctgagtcttggtttcttttatgttttctcttgtgccaccaccaaactgcagaggacctgctgtgacctaaagggcattcctttagcagataagaccttgaaaactgcaaaacacctgggaccagggagcttttaaaaaatacaaaaaaataccacatttgctttttccctgtgaactgtattgacagcgtgttcttaggacagtcttttggtggaaatgttactgtaaaatagttttcatctcacccctcctaatcatactcccactttcctgtttgtgtggtggtgttgctgttttttcctttacatgaattaaccaaatgaattttgtgtcattgtttttggggcttatatttttaaaacatagaaattgccttttgttcatttgaaaagtaagtatgttgtatctgaaaaagggctctgcctctgctctccctcgcttccttgtaaccaatctccaaacgaatctctcctggcaccgcccccttccttatatagggtcactgtccccggggccacctctgcctccaccctgctgtcaccactgccctgggccaaggcacccaggactcccagaaagcgcgagagccagcaagaaggccccactcagccttgagactggtggtcacacctccctgtcagagtcgcctgctgggctgaaggggcaatggattgtcattgttgaaattgtttggctcaggttataaggaggaacttgggaagtagaaagtgacttgaccatgtgcatccttggtagcttcctgtaactaacaaatggaacagagagcacacccccgccccgccccaccccaagcagatgttcccgtcagcgctgccctgagtcagtcggtcccccgtttctgctctcctcccttttgtgttcctgctcacttcaagcttcttccatggactttccagggcacagtcatctctagcccccaaatcatctcttcatcctctgtgtgtgcatttttttaaccaaatgaaatagacaagaaagtcatactttggggcagcagaatttctaatttagtagaatcactgtatagagatagatgttgatatatatgtttgtgtatatatatcaaaccaaattggataggagaagtatagctttacagatgaggagaaggagctctttagaggtcggagtcaagactggtgtcttggacgtgcatgggctgtgtcccaggccactccgcacacatggggctgaggcgtggcgccgggcccttgtcatccacctcaccacggcagagccagcaggccctgtagggtgctgctgctgtctcactgggtcccagcttcaagcgcatcagtgggtgacgggggcaacaaatcagagtgactggaagtttccatcccgttttgctttgaccacgtgtactgagctgcagcctctgatactctgtcacgtttccaaaaatggtatccattaggatagaaagagaatggatctgcagaaatgtttacctttcaactgctcatgaattcaggacactggatagaaagactcactccccaaaatgagaacagggaagaggagacccggcgacactaagtcaccaggtccaaggaacgtggctccctccccagggtcatctcacctagatctttctctcccaggtcatctcagctcaatctcaataaccctatgaaagccctggtctgttgtgttccttcaccgtacggtttctgtaataaaaagtgttaatccatgttaatctgtgtgaaaattattgcgtgcaacagtattttctcgtgtacctctttttcctatgtgaattgtccctcttttttatttataaatgtctacttttgtttttttaaagacaaaccaatgtgttgtagacctatatgtaacctattccttagtctcatattataggtatgttataagaatggatattttacttggctttagaatgttttacaagaaaactaattcttaactgatcaagtccttgctactaaaatgcttgtgtttttcatcatgacgtcgtgtgcttctaaattaatcattttcgttgtagaaaaatggagtgaatttatattagtcttggaaactaataatagcattgtaaatttatgagatgattttaacagaaaaaatatagaagaatatagttattttaattgtaatattactaactgtagggtgagaaaaaggggggggggtcccattgtggtgaactatgttatagcttgttactcatagtttctttttgatcattttttcggtctccgaggtgaaatgacttattaattaaaatttgtaaactcacatatgcatattgtatatgtgtagaaatgtaatcacactttgtcttggaattacattaaactgtttgaaatcactgtaaaaaa

SEQ ID NO: 1602 - protein, 1171 aa, Homo sapien
MAPVYEGMASHVQVFSPHTLQSSAFCSVKKLKIEPSSNWDMTGYGSHSKVYSQSKNIPLSQPATTTVSTSLPVPNPSLPYEQTIVFPGSTGHIVVTSASSTSVTGQVLGGPHNLMRRSTVSLLDTYQKCGLKRKSEEIENTSSVQIIEEHPPMIQNNASGATVATATTSTATSKNSGSNSEGDYQLVQHEVLCSMTNTYEVLEFLGRGTFGQVVKCWKRGTNEIVAIKILKNHPSYARQGQIEVSILARLSTESADDYNFVRAYECFQHKNHTCLVFEMLEQNLYDFLKQNKFSPLPLKYIRPVLQQVATALMKLKSLGLIHADLKPENIMLVDPSRQPYRVKVIDFGSASHVSKAVCSTYLQSRYYRAPEIILGLPFCEAIDMWSLGCVIAELFLGWPLYPGASEYDQIRYISQTQGLPAEYLLSAGTKTTRFFNRDTDSPYPLWRLKTPDDHEAETGIKSKEARKYIFNCLDDMAQVNMTTDLEGSDMLVEKADRREFIDLLKKMLTIDADKRITPIETLNHPFVTMTHLLDFPHSTHVKSCFQNMEICKRRVNMYDTVNQSKTPFITHVAPSTSTNLTMTFNNQLTTVHNQPSAASMAAVAQRSMPLQTGTAQICARPDPFQQALIVCPPGFQGLQASPSKHAGYSVRMENAVPIVTQAPGAQPLQIQPGLLAQQAWPSGTQQILLPPAWQQLTGVATHTSVQHATVIPETMAGTQQLADWRNTHAHGSHYNPIMQQPALLTGHVTLPAAQPLNVGVAHVMRQQPTSTTSSRKSKQHQSSVRNVSTCEVSSSQAISSPQRSKRVKENTPPRCAMVHSSPACSTSVTCGWGDVASSTTRERQRQTIVIPDTPSPTVSVITISSDTDEEEEQKHAPTSTVSKQRKNVISCVTVHDSPYSDSSSNTSPYSVQQRAGHNNANAFDTKGSLENHCTGNPRTIIVPPLKTQASEVLVECDSLVPVNTSHHSSSYKSKSSSNVTSTSGHSSGSSSGAITYRQQRPGPHFQQQQPLNLSQAQQHITTDRTGSHRRQQAYITPTMAQAPYSFPHNSPSHGTVHPHLAAAAAAAHLPTQPHLYTYTAPAALGSTGTVAHLVASQGSARHTVQHTAYPASIVHQVPVSMGPRVLPSPTIHPSQYPAQFAHQTYISASPASTVYTGYPLSPAKVNQYPYI

SEQ ID NO: 1603 - DNA, 4154 bp, Homo sapien
gtatatgtttcgtgagtaatttttaaaaaataaaacaggttaataagaagatccattcctttgcatgtgattgttataacattctttcccagggagttcaatttcagcaacctcagaaatccatacttgatattaggaaactgtaaatgtaacacctgaaattattatgttcactattctacatgaaccttatggaaattcatgatttatgtctttgtttttctttttccaagtatatgcaggactccccaaccttgattttataatggtgactgcattttgtaggtggaatcatttctaccgaaatcattttgaaacacaagaatattgatcagtactgtttcactctgatttagtaaatcagaaagcctccccctacccccagcccccactttcacataccttctgggaggtgcctcagtatagacttggtatctgtgaaggactgagttcatgaatatgcacagaagcacttaaaccatgcctcttatttctataatatctgaaaatggcttcataaaagttaagtcaggagaacactgtttacatgacacttcttaactcatttttaatgtttatttttaatttcaaaaacttgttgcctatttggttttcagtactgcataacactgactttcttaaattagtcatagttgcaataatttacttaaatttggtaatgtcacatttgggttggggtttcagtgggaatagtaacttgccgctagtgagaaatggcattgaatactaaagactcaatatgaacaggctttatagacccttagagaaactgttgccttaatgtttggtgcaatttctagtagtgcataagtgaatttagtcttatgataagtaactttgagctgtttttagcttagtaagaattgtggaaaccacatgtttattgtgcccatcattttacacaaagaaaagaggattatattatttcttctaaggaagtaggagttttcttcctaaaagtgcttacatattgtagtactattacttaaaagttatttatgaagttgggagccttctagtttgcctgtgttgatgtattttgaaaacaaaattgcaataaaggatgagcttccatcggtgtgtatggtataccagatacagatggttgcaaggaaaccttttcccccactagaatagtctattagtaactgctaagtcctagcttgcatttttgaaaatgcctttctgcatgttagcacccagactttcctttgtcatattcctttatagctacaacttaactgtagcttatcagagaagctctgtagtcctacactgaagtgtgttcccttggctgttcatatggggctgggtttggttgaacttccattctgtataaatgctagaacacagttactacagattgattcacaaactgcatgtgctggtgcttgaggcagccaaaatggaatgctgtggaaagcatatctatatcttaaaaaacactcagacaggagttaaggacagctttaataatttttttgtttaccacttaatctttatcaactttgattttagttagggcttagctcatggttgaagaaaagtggaaaataacaagtgcccatttaggtttgaagaatccagaatgttttacctttgactttatgagttatagaagcttggctttgctctaggtttcatgttcccaaatgagccatctgtcagtatattcacttaattcttactaatttcagtttcctgtaaaggaaacaacttacatattgatgcttaaatccagaaagtgtaaaaggttttcttaaactgttaaaatatagtgtctgatataaaggatgtaagttactcagctttctgctccctaagccaaacagtgtttgtcttcagtgtgaaatttaactgtaaaaactacttgtaatgtcaagagattatagatcatattattaataaaatggacctgggtctaatatttttttttcttcaaagggagtgtgaagctgtttattcttttatttgcatatgagtttttcttttagttttagtttttcatgttcatatttccactgatttgaaaacacaaaatttatttttataattttgttgcttgtagcataatcaagtgcaaaatcaagtgcaacctacttgtgactaaatctctttggatttatagctgaggatattgttagctaggttttgtcaatccctaatcattttttaaaatcaatgctgtattcccaggaggctttgagactcctatgaacctgaagcactcccttttgaaccttggaagatcctcaaagagtgagcactcttgtgctcttctaatcataattaattccttaacaaatcagagtaaggaccactgacatatagaacactcaagccaaagaaccatcacagaatttagtaactttagttctgtgaacatgaaaagatttcttttttggtttccaaaggagattatttatttttccacaaggaaaaacatcttgcagagactctgaattccaaatctgagtgagaaagaaaaggaaaaaaatctgtttcatggtggatttctaagcaacatatatacatgtttttaagacaaccttttgttggcagtgtttttcctgaacaccatatgcaccctaggaaacgtttttcctttaatcttgttcacatatcagaaaaggacatgaaatgctcatactggcatacaagtttctataagtagttattttttgagctacttatactatatccccaaaagctcacagtgccttgttgggattttttttttccatgaactagccattattttaaatgagtgggagagggtaagtctttagacagaggtcattcagcagttcaagactattcctcttcaagaacatgtcaggaattaagcagttatatgtggaaacactggtaattctttccacagtgttgttttggataatctgttctagtatatttaactaattgtatggtggacctgtactctgatacacatcgaatcagtcaatgggatttgtatgtgcttttccttcctacattttcattcctactgccccaacctagtagccctaagttgtggcttggtgggtttggcactgagcctcaagacactcactacattctttctggatgtttgctcacaggctccctgaggagcagaacctgtggagctggggagtgcgggtggtttctattcctaatattgtgtgtcagtcctttttcgtgtgatggtgccttcagaataacgaatatttctgttctggacaatgattaaatcttatgagaaatatatgtaggttatattaattcttgtccatttttgctaagcctgtgaaatactttggctctgatacaacttaacttgaataatatcttatcctgagtcttcctccaaggcagtacatattcctgccaggactgtagtaatcctttgggaactacatgtgagtaagcacttgtatgtaagccattatactgctgtaactaatgcatacaaacaattcttctctttacatttatagtctaaaaggggatatgcagtgggaaggaaaattcctgagagattccagcatagctttgtcaattccgactgagccatactgttttccacaagggctcaacacatagtcagtattccgtgctttcagtgtgtgttcagattctcctcttactggttttcttagactgtattgttctataagcaaatgcccatgtgtgatttttaagatgtgctggggaaaaataaatcaataccacaacggaaaaatcacacatgggcatttgcttatagaacaatacagtctaagaaaaccagtaagaggagaatctgaacacacactgaaagcacggaatactgactatgtgttgagcccttgtggaaaacagtatgggctactaggttggggcagtaggaatgaaaatgtaggaaggaaaagcacatacaaatcccattgactgattcgatgtgtatcagagtacaggtccaccatacaattagttaaatatactagaacagattatccaaaacaacactgtggaaagaattaccagtgtttccacatataactgcttaattcctgacatgttcttgaagaggaatagtcttgaactgctgaatgacctctgtctaaagacttaccctctcccactcatttaaaataatggctagttcatgg

SEQ ID NO: 1604 - protein, 4 aa, Homo sapien
MASS

SEQ ID NO: 1605 - DNA, 5034 bp, Homo sapien
agcggccgccaacgccgcccggactggagccctgacattgctgcgctcggggggctccaggcagcccgtatcggggcctttatttctcgtcggcggcgccctgcaccgcgcctcgcaaagccaaacaccagagcaccctagaaggtttaactaaaagaatgctcatgtttgacccagttcctgtcaagcaagaggccatggaccctgtctcagtgtcatacccatctaattacatggaatccatgaagcctaacaagtatggggtcatctactccacaccattgcctgagaagttctttcagaccccagaaggtctgtcgcacggaatacagatggagccagtggacctcacggtgaacaagcggagttcacccccttcggctgggaattcgccctcctctctgaagttcccgtcctcacaccggagagcctcgcctgggttgagcatgccttcttccagcccaccgataaaaaaatactcacccccttctccaggcgtgcagcccttcggcgtgccgctgtccatgccaccagtgatggcagctgccctctcgcggcatggaatacggagcccggggatcctgcccgtcatccagccggtggtggtgcagcccgtcccctttatgtacacaagtcacctccagcagcctctcatggtctccttatcggaggagatggaaaattccagtagtagcatgcaagtacctgtaattgaatcatatgagaagcctatatcacagaaaaaaattaaaatagaacctgggatcgaaccacagaggacagattattatcctgaagaaatgtcaccccccttaatgaactcagtgtcccccccgcaagcattgttgcaagagaatcacccttcggtcatcgtgcagcctgggaagagacctttacctgtggaatccccggatactcaaaggaagcggaggatacacagatgtgattatgatggatgcaacaaagtgtacactaaaagctcccacttgaaagcacacagaagaacacacacaggagaaaaaccctacaaatgtacatgggaagggtgcacatggaagtttgctcggtctgatgaactaacaagacatttccgaaaacatactggaatcaaacctttccagtgcccggactgtgaccgcagcttctcccgttctgaccatcttgccctccataggaaacgccacatgctagtctgattgcctctgtgtcctgcctcagcgtgactccccactcacctggctctctctctgtcctgcctcccattatctaacacattttttacatgtacattttaatttgattcagctggtctgaatctctgaatttatatcatccaaaacttccatatggtcagtagtagatgttctctaatcctccctctccttaccacgggtcagacctaaagaatgtgaacacttttttttttttttctggggatgctaagcaaacccttcttacagatacgtttaatgtaataagaacaagggaacatgtaaactaacataaccaattgtcagttctccatgtattcctcaaaagaatgtcagagtaaatgtattagaaatacagtatccagactgctagtccttgccagagacattcttacctctgccctgtgataatattttatgcttgacagtgaaaacaagtgtggccccttgcaccggttagctagaagtacagccagatttcaagctagtgcagtcacctcttccgtcattcttcacaaatcttgtcaacctggatcttagacttcatctgaatcgagttctttgccctcctttgtgcctgcagctcatatggaggtctttgccaccaatgggagatgagcccaaactttcgatctaggtgggtgatgtgtagcagttcaagggaagggtgctgtgttttcatagcatggagtcggaggagagggccatttagcagggggagcagaagaggcaattcctcctgggctaggggttgtcaatgaggtttcaacattttgttagctgtgtgcagcattcccagagcttcagtctctgtgcatactcagctttgtagaaccatgctgcaaagccatataccgatggggttatccatgcaactatctccattcctacaatgtccttaatatgagatcatcaaacattgatagtagggactccatggaatatttgcccagtaatggtaagaaatctttcgggtaagagtatggatggttcttcttttacccaatctgcttatagctttttttgtaaacagggaaatgttgagtggtacttgtattcccttatcaaattaatcacatagcttttatacagaaactcttcctgtgtgagctgttaaggtgccaaattggctgtcatttgtattcatgacacataccataaagcatctgctaatgctttaatggattgattcaattaagacctgagtgacactatttgtaaatataactagttgtgaagcacacatacctttattttgggaatttatgagaaaatatagaaaaccacagatcagggattcatatatgtagctcaaaaattcccaaaagtttactgttagagttggcaatttcctatcactatttcagtgtcagaacaaactgaaaataatggctcgtgtttatgttgaagataaatagcaccattattgggggaagttattcaaaagcaggcttttgagcaccatagtctaaatgccaataaaaataattcatacatagaaatgtcattggtcctgaatttgaagaaagtgagcaacagtagttaaatgtgggtgcatataaccaaattccccttcatcaagaatggaggagaagagagaagaatgaaatcctgaagattcatcccagccgcaactcaggatccaacacaactttaactgggaggaatacattgtttgatcatttttaaaacatctgtgaatgagtgattccggaggcctgtgaattgtgtggggagcttgctttgatggcactgtgttaataaaagttgtagggactgtgcacctaagaggctaagaggtcccactcatccgccctgtgaaccagctgtaaagaaatgtagttaagaaatgcaaagaaatgtgttatcttggcacttgggtttgattttcctttttttaaagcactgcaaaacttctttaggatactaaaacatcctaattgggctgtttttttgttttgttttgtttttcagctaaaggcaaagataatttttttttcagctgaagtttttcttttttgcaactatgacatgaattgagtgataaaatggctctttgaaaagtagatattgtctgtattgtaaatgcttagtcatattcatggcaaagtgttcatttcttgagatggttctttcacaacacacaagaatcaagatggaacgcaaggaaaatctttttgttttgaccgaggtaaccagtttatgtgtgttccaatccatagagaagtgggggaaagggcgagaaaggatcagattgatctgggatcagctttgagcctgagttcagtgaatagcctcatgggcatctcatggaattgatgcatttgctgtggcatatttaaattttgttcaaaagatttgaagcaagaccttgcaaagactcttaacattactgttcagcttgcttagattgtgttaacagttcatttaacaaagatccgttttaactctgaacaaaagcaacccagagcggccattctctattcccatgctggtcaatacgctttcattaccaattggcccttaccaaacttttcttatatatatatttgtattttactatgatagttgagaaatttagcctcttagtcatttttagctgttattgtggaagacctcaaatacaagattagatgcccttgaacatgttttaatgatgtgtgtcatgttactatcaatggtgatttcaatcgcaatattttaaattgatgagaatgatttgtaaacatgaagttactattacgtaaattctgtttgttatagagtttcttcagttgttacccaagtgtcatcctagagaagtcagaagaatcagaatccatcgtattttagagttatgtgaatctacatcataaatgggcattaacattctaaattgcttggtttggagaatgtgttagcagcatagctatattcaactagggagatgctaaatacacagaagtttcaagagccttggaacagaattacaggggaactatatatgtatatgtatattttattaaacacccatctgcactatcagtattgcactaatgtggaatttgaaagactattttgctgatactgtatatatgcgcatcattcctgattagattgttgtaaagacaatctgaaagatctaaggttttaaaataatttggtttgaaaatatacagttgtcttgaaggaattgctgtcatacatgaagttgctccgagctgtctttattctcttcttggtcaaggttaacaattgctaaatgatcgcaaattcacctaaacaatacatttacaaagccatctttacatgcattaaacgagggctacaacaatattgttttacaaatactagcacttttttttctgttatgtacttagtgttagagggtcaaaataatctttctgcttagcatctcttaaaccatacctgcaaatatagcaggattattacatttacagtactttaatacttgtataaactatgcagaaatttttaataaagtgtaatatattttataagctaataagactgaatgggtaaaggtttttagcatgcgttagtatacttgcagatactgaaacattttggtaatctttcttactaaagatgtgaatgtttaatgtaccttctctgtttctactctgtagtccaatgggaattcagtaatgacattttgtcatgtcaaactgtgaacataaatttgtactgtacagtcctcatatactatatacagtatgcaatatatattatatacttgttaataaaaccatcagaatattaaaaaaaatctatgtcgggtgcggagaaagaggtaatgaaatggcaggaattcgatatcagc

SEQ ID NO: 1606 - protein, 345 aa, Homo sapien
MLMFDPVPVKQEAMDPVSVSYPSNYMESMKPNKYGVIYSTPLPEKFFQTPEGLSHGIQMEPVDLTVNKRSSPPSAGNSPSSLKFPSSHRRASPGLSMPSSSPPIKKYSPPSPGVQPFGVPLSMPPVMAAALSRHGIRSPGILPVIQPVVVQPVPFMYTSHLQQPLMVSLSEEMENSSSSMQVPVIESYEKPISQKKIKIEPGIEPQRTDYYPEEMSPPLMNSVSPPQALLQENHPSVIVQPGKRPLPVESPDTQRKRRIHRCDYDGCNKVYTKSSHLKAHRRTHTGEKPYKCTWEGCTWKFARSDELTRHFRKHTGIKPFQCPDCDRSFSRSDHLALHRKRHMLV

SEQ ID NO: 1607 - DNA, 361 bp, Homo sapien
tttcgcaggccgatccccactccaaccgttccctcagcaaccccaggggtgtcagacggggcaccctcccactgtcttctccagccagccttaaaaaccccagagacgccagcctgggaacgatctcagtatggaatctgaagtcgccttgtcagcacagacacctctggggtccccagaagacctgtggcaaagttctctaaaccgaacctggagaggggaaggttttcaagcaggaaccacataaattcacctaaaactcacgcctacacccctctgtgataaaagatttctgtttcttctgttggagactgaattttctcttcaagactacagtactgtatctgtcaatctgtggaaa

SEQ ID NO: 1608 - DNA, 3463 bp, Homo sapien
ctcttacaacattggctgccggcgtgactttgaccgcttcccggtgcgttaccggcagctgaacccacccggcgccacgggactttgacgcgtgctctgcgcttgccatgagactcctgggagctgcagccgtcgcggctctggggcgcggaagggcccccgcctccctaggctggcagaggaagcaggttaattggaaggcctgccgatggtcttcatcaggggtgattcctaatgaaaaaatacgaaatattggaatctcagctcacattgattctgggaaaactacattaacagaacgagtcctttactacactggcagaattgcaaagatgcatgaggtgaaaggtaaagatggagttggtgctgtcatggattccatggaactagagagacaaagaggaatcactattcagtcagcagccacttacaccatgtggaaagatgtcaatattaacattatagatactcctgggcatgtggacttcacaatagaagtggaaagggccctgagagtgttggatggtgcagtccttgttctctgtgctgttggaggggtacagtgccagaccatgactgtcaatcgtcagatgaagcgctacaacgttccgtttctaacttttattaacaaattggaccgaatgggctccaacccagccagggccctgcagcaaatgaggtctaaactaaatcataatgcagcgtttatgcagatacccatgggtttggagggtaattttaaaggtattgtagatcttattgaggaacgagccatctattttgatggagactttggtcagattgttcgatatggtgagattccagctgaattaagggcggcggccactgaccaccggcaggagctaattgaatgtgttgccaattcagatgaacagcttggtgagatgtttctggaagaaaaaatcccctcgatttctgatttaaagctagcaattcgaagagctactctgaaaagatcatttactcctgtatttttgggaagcgccttgaagaacaaaggagttcagcctcttttagatgctgttttagaatacctcccaaatccatctgaagtccagaactatgctattctcaataaagaggatgactcaaaagagaaaaccaaaatcctaatgaactccagtagagacaattcccacccatttgtaggcctggcttttaaactggaggtaggtcgatttggacaattaacttatgttcgcagttatcagggagagctaaagaagggtgacaccatctataacacaaggacaagaaagaaagtacggttgcaacggctggctcgcatgcatgccgacatgatggaggatgttgaggaagtatatgccggagacatctgtgcattgtttggcattgactgtgctagtggagacacattcacagacaaagccaacagcggcctttctatggagtcaattcatgttcctgatcctgtcatttcaatagcaatgaagccttctaacaagaacgatctggaaaaattttcaaaaggtattggcaggtttacaagagaagatcccacatttaaagtatactttgacactgagaacaaagagacagttatatctggaatgggagaattacacctggaaatctatgctcagaggctggaaagagagtatggctgtccttgtatcacaggaaagccaaaagttgcctttcgagagaccattactgcccctgtcccgtttgactttacacataaaaaacaatcaggtggtgcaggccagtatggaaaagtaataggtgtcctggagcctctggacccagaggactacactaaattggaattttcagatgaaacattcggatcaaatattccaaagcagtttgtgcctgctgtagaaaaggggtttttagatgcctgcgagaagggccctctttctggtcacaagctctctgggctccggtttgtcctgcaagatggagcacaccacatggttgattctaatgaaatctctttcatccgagcaggagaaggtgctcttaaacaagccttggcaaatgcaacattatgtattcttgaacctattatggctgtggaagttgtagctccaaatgaatttcagggacaagtaattgcaggaattaaccgacgccatggggtaatcactgggcaagatggagttgaggactattttacactgtatgcagatgtccctctaaatgatatgtttggttattccactgaacttaggtcatgcacagagggaaagggagaatacacaatggagtatagcaggtatcagccatgtttaccatccacacaagaagacgtcattaataagtatttggaagctacaggtcaacttcctgttaaaaaaggaaaagccaagaactaactttgcttactgtgagttgactgactctaattgaatctgcgtggttttgatactttgatggattccagtggaataaattcaggctgctgaaacaagaaattctgagcccaggaagcgggctcttctttcttcaaaagaagcccttcttgttcatattcaggagcttctgttatattcaaaggtaattctatgtctatctcaactctattgattggttttatagtttattgaaaatcctcaaataaaatataattattactgaaatatgtttaatatttaaggggaaaagagactaatttcagttatacttttaagcttagaatgtatgttcatttccaaattttgtatcataagagttttcaacatagagaaaagctgaaaaaatgcaaagaataaccacatactttccatctaccttcctttgttaacgggttgtttatcatataataatttgttttgtcatatttgctttcactgtctattatctgtttaagtctcataactctatttttagtttgctgaagacttgaaagtgaatcgcatatatcatgacacttcttggagtgtcattaatgggcaggcttttctgttgaagagtggattccgtatgttcttcatagagagtgtttttcagattcttcattgggatattaaaatattagccaaatttctctctgttttatatatgtctgtttatttcagtttgtggtttctgcaaatttgtaactgcctctgttttaggagtataagtattacttccttgtggtctattgtgaagtaaaaagtagacccttgcatatactattcttgtttgtgttcatcttaatgtttttgtacagctaaatcaaatgtaatttatagagttagtttcatcaacctaatgaatgctagttaaatttgaattccttggaatttatcgtatattgtattcactgagattatgaagggacaaatgttaatcttttgtttccagaaaaagttgggctttcccaagcagttctattacccggttcagaattgcttcatccaaaaatcatctgatggtatagatggatcctagtccttttcattacctgatggtagaaataaaataattgatt

SEQ ID NO: 1609 - protein, 751 aa, Homo sapien
MRLLGAAAVAALGRGRAPASLGWQRKQVNWKACRWSSSGVIPNEKIRNIGISAHIDSGKTTLTERVLYYTGRIAKMHEVKGKDGVGAVMDSMELERQRGITIQSAATYTMWKDVNINIIDTPGHVDFTIEVERALRVLDGAVLVLCAVGGVQCQTMTVNRQMKRYNVPFLTFINKLDRMGSNPARALQQMRSKLNHNAAFMQIPMGLEGNFKGIVDLIEERAIYFDGDFGQIVRYGEIPAELRAAATDHRQELIECVANSDEQLGEMFLEEKIPSISDLKLAIRRATLKRSFTPVFLGSALKNKGVQPLLDAVLEYLPNPSEVQNYAILNKEDDSKEKTKILMNSSRDNSHPFVGLAFKLEVGRFGQLTYVRSYQGELKKGDTIYNTRTRKKVRLQRLARMHADMMEDVEEVYAGDICALFGIDCASGDTFTDKANSGLSMESIHVPDPVISIAMKPSNKNDLEKFSKGIGRFTREDPTFKVYFDTENKETVISGMGELHLEIYAQRLEREYGCPCITGKPKVAFRETITAPVPFDFTHKKQSGGAGQYGKVIGVLEPLDPEDYTKLEFSDETFGSNIPKQFVPAVEKGFLDACEKGPLSGHKLSGLRFVLQDGAHHMVDSNEISFIRAGEGALKQALANATLCILEPIMAVEVVAPNEFQGQVIAGINRRHGVITGQDGVEDYFTLYADVPLNDMFGYSTELRSCTEGKGEYTMEYSRYQPCLPSTQEDVINKYLEATGQLPVKKGKAKN

SEQ ID NO: 1610 - DNA, 558 bp, Homo sapien
ggcacgaggccttcggccacccccgctgaccatggcagtgtttcatgacgaggtggaaatcgaggacttccaatatgacgaggactcggagacgtatttctatccctgcccatgtggagataacttctccatcaccaaggaagatttggagaatggggaagacgtggcaacgtgtcctagctgctctctcattataaaagtgatttatgacaaagatcagtttgtgtgtggagaaacagtcccagccccttcagccaacaaagaattagttaaatgctgaagaagccttcaggaatccaaatcctgaacatttggaatgagcccagatagaaatatcgaatgcaaagctactggcttcacagagacaaccatttatgatttgctgttctgtaagagtgtggattctttctatcaactgctgatatcatcttcaggaagcaagtccataacatgacatatctggattttgtgcttagaaccttaaattggaagcattcttaattatgcatctaaatttaaaagaagataatttcaaaacagtaaaaaaaaaaaaaaaaa

SEQ ID NO: 1611 - protein, 82 aa, Homo sapien
MAVFHDEVEIEDFQYDEDSETYFYPCPCGDNFSITKEDLENGEDVATCPSCSLIIKVIYDKDQFVCGETVPAPSANKELVKC

SEQ ID NO: 1612 - DNA, 415 bp, Homo sapien
ggcacgaggccagatactactggccatcaagggacagaagaaaaaggcgctcattgtggggcactgcatgcctggcccccgaatgacccccagattcgactccaacaacgtggtcctcattgaggacaacgggaaccctgtggggacacgaattaagacacccatccccaccagcctgcgcaagcgggaaggcgagtattccaaggtgctggccattgctcagaactttgtgtgagttgagcccaggcctctggttgcaggactcgtgaatggagcagttctgagaaccacccttttgctaagggagcttgggagccacatggctgctcccttcacactgggtaacagtgtagtatcctgtgagagaataaatgtattcatttaaaaaaaaaaaaaaaaaaaaaaaaaaaaaaaa

SEQ ID NO: 1613 - DNA, 5081 bp, Homo sapien
gcaccggcccggaacacgctagtggagcggaagattgcggcggcggtcaggcggccgcttgcagccgggacttcagttgggctgaggcggaggagccgccgcttctgacctcgctctggctccggtgcgcgcggctgagcgcgtgcgaggccccgcgcgtcgggcaggggcggcggcggccactgcgcgccgccctgaggagcgccccagcggcggcgcgactgcggctgaggagagagccggctccgggcctccgcgtcctcctgctcccccggccccccgcctcctcgggggggcggcggcgactacggactggtgacggccggctgcggcttcgggaaggacttcccgtaagggcctcctcaagaagggcgcgtgctacggggacgacgcgtgcttcgtggcccggcaccgttccgcggacgtgctcggggttgcagatggtgtaggaggctggagagactatggagttgatccatctcaattctcagggactttaatgcggacgtgtgaacgtttagtaaaagaaggacggttcgtacctagtaatcccattggaattctcaccacaagctactgtgagttgctgcaaaataaagtccctttgctcggtagcagcaccgcctgcattgtggtgctggacagaaccagccaccgcttacacacagcaaacctgggcgattcaggcttcctggttgtcaggggtggtgaagtcgtgcaccgatcagatgagcagcagcattacttcaacactccattccagctctcaatcgctccccctgaagccgagggagtcgtcttgagcgacagtccggatgctgctgatagcacgtctttcgatgtccagctaggagacattatcctgacggcaacagatggactctttgacaacatgcctgattatatgattcttcaggagctaaaaaagttaaagaattcaaattatgagagtatacaacagactgccagaagcattgctgagcaagctcatgagctggcctatgacccaaattatatgtcaccttttgcacagtttgcatgtgacaatggattgaatgtgagaggtggaaagccagatgacatcaccgtccttctttcaatagtggctgagtatacagactagctgaggtgtcaagtcctgcctttcctttcatcatcccaaatttcccctgccatgtgtgctgatcctgctggcaggaccacatttctttgccactgatctcaatggccagtgatgtaagtcttttgcctgtcttcttgagactcgttgagatctttgttgagaaccactactatcattcactagctcatatctgccggcagcaattgaagagatccaatatttgaagattggccttcatttctcgatgttctttccatgatggggatggaggtgttcagtgccaccgtggctgttacttttcaaagtagttgaagtattgaaaatgagtaatgttggtaaagtgaattcaaaatcctagtatgctaaagggatggtacaagtctaacacaaattgtacgtaatgatacatctactagaaacatacattattcatcaaaagaaatgttacatgtgtactccacaggcatagtctttgttatgatgattggtgtggctttatgtctttgttataaactcctatttttcaggggcttatgattctgctctaaaacattgctctgggttatacagttttgatcccaaaagcttttttgttacaaatcgggagaaaaatccattttagttctatggatggaaatatttcatgcttttaaaaagatgtttgtgttcctgtggttaaagttttggcagtttattgattagtccaaatcacaggctaaggcctgatctccaggaggggtaggggagacactttaccagtatttttttatggaaataatactcaaggttgtaaaacccctcaaagcctagaaatttaattgttatggctgaaattcctcctagttgtctgatagaatgcccctgaatgggaactctaggtcccaaggcctgaagggttgagaacagacagctgtaactttgaattttgttggctttcagtggtcatgctacctacccatactcgtactctcagaccttttattagtagccttgctttctatagagcatgcaccaaatccagtgagtccatgtggagagagcactgtgtgcgcagcggcagcagcacagacgtccatgaggaaaactcccagtgatgatctgacatttacaattaccccacatggaaatttaggggtttctgaatcaagcttaatgtttacagtttccaaatagccattttgcagtgtatagtttccttacaaaactaccccgcattcagttttcacattatctgcaagctgaaacttatttttaagttttgtgtacaagttgactgctgtaaagatatatatttttgggtcagtttttttccttcattaacttggtggtagaaaaaaatatatacttagaaatccttaaattaaagccatgttttatatataagtcaggtaacattggtgtatagatgagaatgcaattaaacctgatgagaatctacttgagaatatagaaagtctttctctaaaggagatactgactccctggtttattgcattaaaatttatgtttgaggttacctcaacttgttttaaaagattttgttttgtgaatttgtactgtatatttgagtaactgtcaggcttttatttaaaattgtttaacatgtaccatgtacatgtcattactatatttcaatgcatcatgcttgtaacaggcatttcatttataataagaatgagttattcatttgtaagccgttcagtaatttatctactattcctaaattggcataatgttagataatctattttgaatcacctttaattacatgtcagaatgccttaactaccctaacttgacaaaacagaattctttggtagacgcggtgggggcggggtggggggtctggacggagtctctatttaaggagaaatcatcatgctatgataaaacacagaagcatgagtggcaagtggcggggtatttattttgcacaaactatttgcagtctctgtgtatttaaaaagtaaagaaagttgcatccagaagggttttgttagaatgaatacatttatattaggactgacaacttcagctcttttgtttaggttttcaattatttttggtaagagtatgtagccttatgatctggatatattttgcattcattttccaacgcctacatttaattcctggtaagagcagtgctcgtcaagtttctggtttttctctgctctcatttaacccgtcaaacacaatctttgtaaagctagattggtggtgttttatacaacttatttactcagcttacctttttgagaaacgattgttagaaattgacgatgtgtttgttccagtgatactgaaagtagtgggggcaagaattgagtttcacagtggaattggctttggatctggcctatagattagtgacataaaatattttctctattttcccctgttctttttgtgttatgcacttaattttatgactgccgggggggtcagctggagtgctgcttaacaagtatctctcctactctcagtggtcagaggctgtgttggacccatagtagaattttccaggtcacagacccaagcttccatgggttgttactgtgctgtaccacttggtgggtctgattctgaacctgatgtgtgtgttaattatattttaagcaacacacacgacacacacacgcctcatgtaatggacttttataacaaaagaaaaaatttggatttctaatttacaaatggcaaattatttatccctctctggatgcaccaaagaccagtaaagtttatagcttttccatctatatttataaagcaatactgtattataaaaatcaatatttttatcacatgcttgaaatttttattttgttgttttaaaatgtgcactctaaacatatcagaaccttatttcttcctatgaacttaagctgcctgcgcacaaaaaaaaaaaaaatttaccaaatggagatgcagtagagtccataggctctaaaaactaaaagaaatgggatgcagggggaacaagttatttgtcctgagttactgtacttgcttgacatggttgttgggtactaaatcacaaaagaatccattccaggtatgcatgtctgggggttgggctgtgtctagattagaaactgggtttcaagctttgcatgatgggagagcgtcctctcctctatcagctgcgtgtgttctggataggacagtagcccggagatggaaaccaccttcagtaccattagcccaccataccaagtaacaagttaggcaggaatcgtgggaatttattgagtcagctttgagtgtttgagagaatgtaaacaagattggctcgaattgtaaacgtttgtactttggatgagttcatggttctttaggtcaccttaataccagctatctttggtagaagctacagcattcagtttctctggaaactgtatcacatttttgcattttaaaaattttacagtatcaaaaaaccaaaatctgcttatgaaacaaaacatgaagcaggacatatttggattctatttatttaaaattaaattctttgcaaaattgaacttctcaactaaaacgtgtccatgtcagaattttaactgttagcaggtagtttgtggcaaagatggctaaataatgaagcaaattagaatctgtgtgtatactaatgagctgctttttttctgttgagactatcattatttgtcttattacccaagaggcaattacctgaatttggatgtctgaattataacttatgcaggaatagttctgtaaatacatttaaataaactgtaaagatatttaataaatatagtatttatactaatctgtgtgcttcttttggtttgaatagtaactaaatgagacaccagcccttgacattgagtttgttggtcactatcaggtcctcatttccaagcctcctagtcattctagcactgattatatgctgctactttaactggctccagctgcttcactacatcagttt

SEQ ID NO: 1614 - protein, 373 aa, Homo sapien
TGPEHASGAEDCGGGQAAACSRDFSWAEAEEPPLLTSLWLRCARLSACEAPRVGQGRRRPLRAALRSAPAAARLRLRREPAPGLRVLLLPRPPASSGGRRRLRTGDRPAAASGRTSRKGLLKKGACYGDDACFVARHRSADVLGVADGVGGWRDYGVDPSQFSGTLMRTCERLVKEGRFVPSNPIGILTTSYCELLQNKVPLLGSSTACIVVLDRTSHRLHTANLGDSGFLVVRGGEVVHRSDEQQHYFNTPFQLSIAPPEAEGVVLSDSPDAADSTSFDVQLGDIILTATDGLFDNMPDYMILQELKKLKNSNYESIQQTARSIAEQAHELAYDPNYMSPFAQFACDNGLNVRGGKPDDITVLLSIVAEYTD

SEQ ID NO: 1615 - DNA, 1746 bp, Homo sapien
gggcttatgaggtcaattggaaataagaacaccattttactgggtctaggatttcaaatattacagttggcatggtatggctttggttcagaaccttggatgatgtgggctgctggggcagtagcagccatgtctagcatcacctttcctgctgtcagtgcacttgtttcacgaactgctgatgctgatcaacagggtgtcgttcaaggaatgataacaggaattcgaggattatgcaatggtctgggaccggccctctatggattcattttctacatattccatgtggaacttaaagaactgccaataacaggaacagacttgggaacaaacacaagccctcagcaccactttgaacagaattccatcatccctggccctcccttcctatttggagcctgttcagtactgctggctctgcttgttgccttgcttattccggaacataccaatttaagcttaaggtccagcagttggagaaagcactgtggcagtcacagccatcctcataatacacaagcgccaggagaggccaaagaacctttactccaggacacaaatgtgtgacgactgaaatcaggaagatttttctatcagcacccaggtcttagttttcacctctagttctggatgtacattccatttccatccacagtgtactttaagattgtcttaagaaatgtatctgcatgaactccgtgggaactaaaggaagtgggaacttagaaccagacagttttccaaagatgttacaatttcttttgaaaaaccctttgtttattagcaccaatttctcgccactaagctatttgttttattatacatcctttaattaaaaactatatatgtaacttcttagatattagcaaatgtctctgctaccatttccttaaggtgttgagctttaactctatgctgactcagtgagacacagtaggtagtatggttgtggacctatttgttttaacattgtaaaattttgagtcagattttaatattgtaaaatcttgggtcaaataattcaaagccttaatgcagatgcactaaaacaaagaaatggtaaatgaattgtttgcatttaaaaaaaaaaactcttaagaaaactgtactaaatctgaatcatgttttgagcttgtttgcagtacttttaaacattattcactactgtttttgaagtgagaaagtatcagccatttagcatttaagttggggtatttagagcctgtaatctaaatgctggctcaaatttattccccagctacttcttataccactattcttttaatgtttgcataatcataagcacctcaacacttgaatacataatctaaaaattatatagtaaagctggtagccttgaaaatgtcagtgtgatatctattatgtagataaatatatatagtggcctttcaggactgtcacagtaacactttatttacagagctaatgtttgtcctaaattttcaggaccctagaggagagctttatacaattaccgatgtgaatttctctaaagtgtatatttttgtgtccagttatattatttaaaaaagtgttactttgtaaaaattgtatataaagaactgtatagtttacactgttttcatctcgtgtgtggttattgcttaatgctttttaaacttggaacactcactatggttaaataaggtcttaaaagaaatgtaaatattctgttaataaagttaaatattttaatgattttttttaaaaaaaaaaaaaaaaaaa

SEQ ID NO: 1616 - DNA, 1664 bp, Homo sapien
tcatggccggctcctaccctgaaggtgcacctgcaatcctcgccgataagaggcagcagttcggaagccggttcctgagcgatccggcgcgggtcttccaccacaatgcctgttgattatgagatcaatgcccacaaatactggaatgacttctacaaaatccacgaaaatgggtttttcaaggatagacattggctttttaccgaattccctgagctggcacctagccaaaatcaaaatcatttgaaggattggttcttggagaacaagagtgaagtatgtgaatgtagaaacaatgaggatggacctggtttaataatggaagaacagcacaagtgttcttcgaagagccttgaacataaaacacagacacctcctgtggaggagaatgtaactcagaaaattagtgacctggaaatttgtgctgatgagtttcctggatcctcagccacctaccgaatactggaggttggctgtggtgtgggaaacacagtctttccaattttacaaacgaacaatgacccaggactctttgtttattgctgtgatttttcttccacagctatagaactggtccagacaaattcagaatatgatccttctcggtgttttgcctttgttcacgacctgtgtgatgaagagaagagttacccagtgcccaagggcagtcttgatattatcattctcatatttgttctttcagcaattgttccagacaagatgcagaaggctatcaacaggctgagcaggcttctgaaacctggggggatggtacttctgcgagattacggccgctatgacatggctcagcttcggtttaaaaaaggtcagtgtctatctggaaatttctatgtgagaggtgatggaaccagagtttacttcttcacacaagaggaactggacacgcttttcaccactgctggactggaaaaagttcagaacctggtggaccgccgactgcaggtgaaccgagggaagcaactgacaatgtaccgggtttggattcagtgcaaatactgcaagccccttctgtccagcaccagctaagaggcacctgctgccaacacgatgcaagcccgttgtgtttccgagctttttttaaaaaaaaatttgtagcaccgggcatggtgcatgcctgtaatcccagccactcaggaggctgaggcagggaggatccattgagcccaggagtccagcctgggcaaaatagcgagagaccctgaatctgaaagtaatgataaaataaaaagaatataaatgaggtctcgttgatgctggacaattcaagaattcagacttgaaccttaaacctaggaaaagttactttgtatcaggattctaacaattatgcttcatatttgtgaagtcctttaaaacataattttctcaagttctttctttgagacctcaatctgtcttagcattttgtaactaataactgaaattttattcaaaggaattgtaaaccttaaaccaccaatttatttccatgtgaaaaagtgttatatatgacaagtgttttttgattgtaattgcgttaaatcttttgagagtgtaaatgccgggctaggcaattgcagttaatacatacaggggttagtgaagggcttattaagttgtaggggaagcaagctgggaagaatcagatcagatattttcctgac

SEQ ID NO: 1617 - protein, 313 aa, Homo sapien
MPVDYEINAHKYWNDFYKIHENGFFKDRHWLFTEFPELAPSQNQNHLKDWFLENKSEVCECRNNEDGPGLIMEEQHKCSSKSLEHKTQTPPVEENVTQKISDLEICADEFPGSSATYRILEVGCGVGNTVFPILQTNNDPGLFVYCCDFSSTAIELVQTNSEYDPSRCFAFVHDLCDEEKSYPVPKGSLDIIILIFVLSAIVPDKMQKAINRLSRLLKPGGMVLLRDYGRYDMAQLRFKKGQCLSGNFYVRGDGTRVYFFTQEELDTLFTTAGLEKVQNLVDRRLQVNRGKQLTMYRVWIQCKYCKPLLSSTS

SEQ ID NO: 1618 - DNA, 903 bp, Homo sapien
catgctgaaagcagggcgggaccggggcggtcttccagcagggaaaatggcgctggccatgctggtcttggtggtttcgccgtggtctgcggcccggggagtgcttcgaaactactgggagcgactgctacggaagcttccgcagagccggccgggctttcccagtcctccgtggggaccagcattagcagtacagggcccagccatgtttacagagccagcaaatgataccagtggaagtaaagagaattccagccttttggacagtatcttttggatggcagctcccaaaaatagacgcaccattgaagttaaccggtgtaggagaagaaatccgcagaagcttattaaagttaagaacaacatagacgtttgtcctgaatgtggtcacctgaaacagaaacatgtcctttgtgcctactgctatgaaaaggtgtgcaaggagactgcagaaatcagacgacagatagggaagcaagaagggggcccttttaaggctcccaccatagagactgtggtgctgtacacaggagagacaccgtctgaacaagatcagggcaagaggatcattgaacgagacagaaagcgaccatcctggttcacccagaattgacaccaaagatgttaaaaggataacttcacagtaaatcatttctcctgaaatagaggaagattctttacgttgttgtgcttgtttttaaatcatcagtatagtttaacacattctttctaagcagttttgtgtgggataatttgaagaatatattatgagtaaactccgaaaattttgtttatccaaaggctcaatggattatgtttctattatatacaaggttttaagtaaacataaaatttccagaacaaaaataaaaaatttaaaattcatagcaaaaaaaaaaaaaa

SEQ ID NO: 1619 - protein, 188 aa, Homo sapien [sequence omitted]

SEQ ID NO: 1620 - DNA, 6654 bp, Homo sapien
  Unsure 65-103: Unknown base
  Unsure 6474-6504: Unknown base
  Unsure 6627: Unknown base
ctcgggcagagcgctagggctccgagcgaaccagcgagcgagcgaacgagcggcgctcggcgggnnnnnnnnnnnnnnnnnnnnnnnnnnnnnnnnnnnnnnngcgcggccgggcgaggcgggcccgtccgggagcgggctccggggaaggggtgcgggtctgggcgccggagcggggagcggggccgcgtccctctcagcgccagctctacttgagccccacgagccgctgtccccctggcgcgctcggggccgcgggacgggcgcacgccgccttctcctagtcaagtatccgagccgccccgaaactcgggcggcgagtcggccacgggaagtttattctccggctccttttctaaaaggaagaaacagaagtttctcccagcggacagcttttctttccgcctttttggccctgtctgaaatcgggggtccccagggctggcaggccaggctcgctgggctcctaatcttttttttaatttccaatttttgattgggccgtgggtccccgctgagctccggctgcgcgcgggggcgggagggcgcgcgcaggggagggaccgagagacgcgccgactttttagagggagggatcgggtggacaactggtcccgcggcgctcgcagagccggaaagaagtgctgtaagggacgctcgggggacgctgttcctgaggtgtcgccgcctccctgtcctcgccctccgcggtgggggagaaacccaggagcgaagcccagagcccgcggcgcggccggcggacgaacgagcgcgcagcagccggtgcgcggccgcggcgagggcgggggaagaaaaacaccctgtttcctctccggcccccaccgcggatcatgtaccaggattatcccgggaactttgacacctcgtcccggggcagcagcggctctcctgcgcacgccgagtcctactccagcggcggcggcggccagcagaaattccgggtagatatgcctggctcaggcagtgcattcatccccaccatcaacgccatcacgaccagccaggacctgcagtggatggtgcagcccacagtgatcacctccatgtccaacccataccctcgctcgcacccctacagccccctgccgggcctggcctctgtccctggacacatggccctcccaagacctggcgtgatcaagaccattggcaccaccgtgggccgcaggaggagagatgagcagctgtctcctgaagaggaggagaagcgtcgcatccggcgggagaggaacaagctggctgcagccaagtgccggaaccgacgccgggagctgacagagaagctgcaggcggagacagaggagctggaggaggagaagtcaggcctgcagaaggagattgctgagctgcagaaggagaaggagaagctggagttcatgttggtggctcacggcccagtgtgcaagattagccccgaggagcgccgatcgcccccagcccctgggctgcagcccatgcgcagtgggggtggctcggtgggcgctgtagtggtgaaacaggagcccctggaagaggacagcccctcgtcctcgtcggcggggctggacaaggcccagcgctctgtcatcaagcccatcagcattgctgggggcttctacggtgaggagcccctgcacacccccatcgtggtgacctccacacctgctgtcactccgggcacctcgaacctcgtcttcacctatcctagcgtcctggagcaggagtcacccgcatctccctccgaatcctgctccaaggctcaccgcagaagcagtagcagcggggaccaatcatcagactccttgaactcccccactctgctggctctgtaacccagtgcacctccctccccagctccggagggggtcctcctcgctcctccttcccagggaccagcaccttcaagcgctccagggccgtgagggcaagagggggacctgccaccagggagcttcctggctctgggggacccaggtgggacttagcagtgagtattggaagacttgggttgatctcttagaagccatgggacctcctccctcattcatcttgcaagcaaatcccatttcttgaaaagccttggagaactcggtttggtagacttggacatctctctggcttctgaagagcctgaagctggcctggaccattcctgtccctttgttaccatactgtctctggagtgatggtgtccttccctgccccaccacgcatgctcagtgccttttggtttcaccttccctcgacttgacccttccctcccccagcgtcagtttcactccctcttggtttttatcaaatttgccatgacatttcatctgggtggtctgaatattaaagctcttcatttctggagatggggcagcaggtggctcttctgctggggctgacttgtccagaaggggacaaagtgcaatacagagccttccctaccctgacgcctcccagtcatcatctccagaactcccagcggggctccctgagctctcaaggagatgctgccatcactgggaggctcagaggacccttcctgcccaccttcggagacggcttctggaggaacggcttggccagaagacagggtgtgagtgagacagtggggcacaggttgggtttgccaaacgcctaattaccaggccaggaagcatgccaacaaagccacacgggtgtcctagccagcttcccttcacctggtgtcttgagtagggcgtctcctgtaattactgccttgccattctgcccctggacccttctctccggaccagggaggcgtccctccctaggagccacacattatactccaagtccctgccgggctccgcctttcccccaccctggctctcagggtgacgccacccacagagatttaatgagcgtgggcctggaccttccccagatgctgccaggcagcccctccccaagcctcaaagaagcatttgctgaggatggagaggcaggggagggaggcgggaggccgtcactggagtggcgtctgcagcagctgctgccccagcacccgctcagcctgtcctggctgctcacctccccgcagggcaccgggcctttcctgccctctgtggtcatctgccacctgctggatcaagtgctttctcttttacactcccctgtccccaccccagtgcactcttctggcccaggcggcaagcaagctgtgaacagctggcctgagctgtcgctgtggcttgtggctcatgcgccattcctggttgtctgttgaatctttctggctgctggagttggagataggatgttttgcttcccactgcaggagagctgccccctttcacggggttggggaagggtccccctggcctccagcaggagcacagctcagcagggtccctgctgcccacccctctgagccttttctccccagggtatggctcctgctgagtttcttgtccagcagggccttgacaggaatccagggagtagctcctggccagaaccagcctctgcggggcttgtgctctgcaaagactctgctgctggggattcagctctagaggtcacagtatcctcgtttgaaagataattaagatcccccgtggagaaagcagtgacacattcacacagctgttccctcgcatgttatttcatgaacatgacctgttttcgtgcactagacacacagagtggaacagccgtatgcttaaagtacatgggccagtgggactggaagtgacctgtacaagtgatgcagaaaggagggtttcaaagaaaaaggattttgtttaaaatactttaaaaatgttatttcctgcatcccttggctgtgatgcccctctcccgatttcccaggggctctgggagggacccttctaagaagattgggcagttgggtttctggcttgagatgaatccaagcagcagaatgagccaggagtagcaggagatgggcaaagaaaactggggtgcactcagctctcacaggggtaatcatctcaagtggtatttgtagccaagtgggagctattttcttttttgtgcatatagatatttcttaaatgaagctgctttcttgtcttttatttctaaaagcccccttataccccactttgtgcagcaaagatccccgtgcaggtcacagcctgatttgtggccaggctggacaaattcctgaggcacaacttggcttcagttcagatttcaagctgtgttggtgttgggaccagcagaaggcaaacgtccagccaacacacaggactgtaagaggactctgagctacgtgccctgtgaagacccccaggctttgtcataggaggtcgttcagcttccccaaagtcagaggtgatttgatttggggaagactgaatattcacacctaagtcgtgagcatatcctgagttttacttccttatggcttgccctccaagttctctctctcatacacacacacacccttgctccagaatcaccagacacctccatggctccagctatgggaacagctgcattggggctgcctttctgtttggcttaggaacttctgtgcttcttgtggctccactcgcgaggcagctcggaggtgtggactccgattgggctgcaggcagctctgggacggcacagggcgggcgctctgatcagctcgtgtaaaacacaccgtcttcttggcctcctggccagtctttctgcgaatagtcctctccctggccagttgaatgggggaagctgctggcacaggaaggagaggcgatcccggctgaggcttaggaaattgctggagccggctccaagcagataattcactggggaggttttcagagtcaaacatcattctgcctgtgttgggggccaggtgtgtcacacaagcatctcaaagtcaaaagccatctggggctgctgcttctctttctcaggctctggggaaaggaatctccctctcctctcacttgattccaagtgtggttgaattgtctggagcactgggactttttttctcttttccttgatggaccaacagtgcaaatgcaatctcgccatttaactttcaggtcgatttcctttcctgatcagacatctttgtgccccctttaggaaggaaaagaatacacctacgatgtgccaggcactgtgttaggcgcttttatatagatcctcgttaggatgagactaagggatgaggacatctctttataaaaggcccctaagtaatggataaacagaaacacttagaggtgagaaggtctgtcttcaagatccaaggtaagattgccttcagtctgatgtttgttctcaaggacttatcccctacaatattctcccactccatacttctccttctaccccaccatgtgctcccgtgcactcctcagatggtcagaggggtaacccaagtccttagagaatttggggaccaatagaatatgtgatgtgtgaattttctttaaaaaacttaaggagtctttgctaccttctgcttgttgagttgttttggcattcatattaaaagccagcatctcactatttattgacaggttgggctgtgtgtgtgcgcatgtgtgtatacatttccaggcgtgcctgtgtcctgtagctttttaaaaggaaacccagtcatcccactatgaatctggcatcttcttatgcttctagtgttttggccatacatcaaccaaggggtttaatttatccaatgcttgacgacatgttcaggaggggctggatcaaattttgagagggttatgggaaagggagggggagaagaaattgacatttattttattatttattttaaatgtttacatcttctttatgttgtatcaagcctgaatagaaactgatagcattaaaatactccgttcctctctctcttctcgcttcctttttttttttttttaaatttaggataacacatttttgtttctaaagtgatttgtgatttgtgctgtataaactgtataaaaggttctgtttttaaaggtggattttcattcctctggggacagtggtcgccaagacatctacattgtaagagaacacagtggaagatcctgtcctgattctcaaaaattattttctctgtatgattaaaagtttattccatttattttagtttgtgtttacttgattttgaggaagaaaatatttgactttgtgtaaagagtagggtatcagggtgtcttttctgcggtgggagatgtgtatatatatagtattttggtgtatagtagaaaataagctttgtgcatctgtatttgagatatgttaatgacgtggagtaaagtcagctgtaagactctggaggcaaacaagttgtatatggttcatatggctctatggggaatttaattacctttctgggcacttttctttttttttttttcttaagtaatggtgaaatggtcccattggagagtctcctaaatagaccttccaggcagaaccgcaagctcaaaatctttgtatagttttgaaaattgaggagtagctttgtttggaagcctttcnnnnnnnnnnnnnnnnnnnnnnnnnnnnnnngttgttttactatatgtaatacaagcctacagtatttgcactaaagaaagcttgttagaaaaagcttgctgctatggaagaaagaacatattaaaacttctttcccttgcgatttttttgggngaggggggttagcatttccactttcag

SEQ ID NO: 1621 - protein, 326 aa, Homo sapien; identical to SEQ ID NO: 1244

SEQ ID NO: 1622 - DNA, 2618 bp, Homo sapien
ctgaggcaggggtctctgggggcgaggagggcgcgtcgccctctgcccccgccggcaccctggccatgacaggcaagtcggtgaaggacgtggatcggtaccaggctgtcctggccaacctgctgctggaggaggataacaagttttgtgcagattgccagtctaaagggccgcgatgggcctcttggaacattggtgtgttcatctgcattcgatgtgctggaatccacaggaatctgggggtgcacatatccagggtaaagtcagttaacctcgaccagtggactcaagaacagattcagtgcatgcaagagatgggaaatggaaaggcaaaccgactttatgaagcctatcttcctgagacctttcggcgacctcagatagacccagctgttgaaggatttattcgagacaaatatgagaagaagaaatacatggaccgaagtctggacatcaatgcctttaggaaagaaaaagatgacaagtggaaaagagggagcgaaccagttccagaaaaaaaattggaacctgttgtttttgagaaggtgaaaatgccacagaaaaaagaagacccacagctacctcggaaaagctccccgaaatccacagcgcctgtcatggatttgttgggccttgatgctcctgtggcctgctccattgcaaatagtaagaccagcaataccctagagaaggatttagatctgttggcctctgttccatccccttcttcttccggttccagaaaggttgtaggttccatgccaactgcagggagtgccggctctgttcctgaaaatctgaacctgtttccggagccagggagcaaatcagaagaaataggcaagaaacagctctctaaagactccattctttcactgtatggatcccagacgcctcaaatgcctactcaagcaatgttcatggctcccgctcagatggcatatcccacagcctaccccagcttccccggggttacacctcctaacagcataatggggagcatgatgcctccaccagtaggcatggttgctcagccaggagcttctgggatggttgcccccatggccatgcctgcaggctatatgggtggcatgcaggcatcaatgatgggtgtgccgaatggaatgatgaccacccagcaggctggctacatggcaggcatggcagctatgccccagactgtgtatggggtccagccagctcagcagctgcaatggaaccttactcagatgacccagcagatggctgggatgaacttctatggagccaatggcatgatgaactatggacagtcaatgagtggcggaaatggacaggcagcaaatcagactctcagtcctcagatgtggaaataaaaacaaaacacctgtatggctgccattctcttcagccctcgctctcccctttccacagcctccacccctgacccccatcctcttttcctacctctctgtttggtttagaaattgctcaataagtcatttggggtttggcatcctgcccagccacttcccaaacatgaagacctctctgttgctttatgttgtacatgccccatagccatcccaacgtcctccccagtcctctcctggcaccagcaccttagaagttgttggcagaaggcacttaaactgtgggagaagtgtgcacacctttgagtcccttccctcaaggttaaagctcctgtcagactctcagaagggtctgtgggtgttgtatattaggcaaacaggggaaagcttagaggtccttctatatgtgttaataagctgtttctaagtgtttaaatttgaaaagcatcatgttctcatgatttatgggaatgaagcaagtactgaaatcaaattaaatactccctgggtcctgggtcagtttgaccctagccctggggtgaggcaagccccctcctatgaggatgagcaaaaatactactctcttcgccctgagttgctttctggatctggggcttcaggacttgctgcttcagtcagcttttattagcaccaaagactttatgaagatcccacacacagacacacatcccttcccgcctcccccctgccttcagtaggatctggctccgtggctggaggaccaacccctatagtgggaatgcagagcttaacgtgtactgcttgtgtgtgtgcgtgagtgtgtgtgtgtgtatgagtgtgtgttccgcctcccaccctctccccatctgctctgggtatttttgtttttgtttagttttaggtttacaacagagaggaattaatttatcagcagcctaaaactgttgtgtttttcttatggtttaaaaaacgccatgtcattgataactccctttctcccttcccttctcccggtctgctgatcactctttcatgcctgtgtatccagggtgctctgtttccccaccgttcccaggtgtacgaggcagagggccgggacagctttcctctcagtcattgttcaccccacttgaaaattcagacaagaaaactttgcttaaaagatttcatgtgtgggaaccacagttcctggctgcctttctcctgtgtatgtgtaaattccttaataaatattgcagggaaaaaaaaaaaaaaaaaaaaaaaaaaaaaaaaaaaaaaaaaaaa

SEQ ID NO: 1623 - protein, 429 aa, Homo sapien
MTGKSVKDVDRYQAVLANLLLEEDNKFCADCQSKGPRWASWNIGVFICIRCAGIHRNLGVHISRVKSVNLDQWTQEQIQCMQEMGNGKANRLYEAYLPETFRRPQIDPAVEGFIRDKYEKKKYMDRSLDINAFRKEKDDKWKRGSEPVPEKKLEPVVFEKVKMPQKKEDPQLPRKSSPKSTAPVMDLLGLDAPVACSIANSKTSNTLEKDLDLLASVPSPSSSGSRKVVGSMPTAGSAGSVPENLNLFPEPGSKSEEIGKKQLSKDSILSLYGSQTPQMPTQAMFMAPAQMAYPTAYPSFPGVTPPNSIMGSMMPPPVGMVAQPGASGMVAPMAMPAGYMGGMQASMMGVPNGMMTTQQAGYMAGMAAMPQTVYGVQPAQQLQWNLTQMTQQMAGMNFYGANGMMNYGQSMSGGNGQAANQTLSPQMWK

SEQ ID NO: 1624 - DNA, 951 bp, Homo sapien
aagggtgaaatagaagattatcgtttgctgacagatattttgggaattgaagattacaatggtgacatggacttcaaaatagctggcactaataaaggaataactgcattacaggctgatattaaattacccggaataccaataaaaattgtgatggaggctattcaacaagcttcagtggcaaaaaaggagatattacagatcatgaacaaaactatttcaaaacctcgagcatctagaaaagaaaatggacctgttgtagaaactgttcaggttccattatcaaaacgagcaaaatttgttggacctggtggctataacttaaaaaaacttcaggctgaaacaggtgtaactattagtcaggtggatgaagaaacgttttctgtatttgcaccaacacccagtgctatgcatgaggcaagagacttcattactgaaatctgcaaggatgatcaggagcagcaattagaatttggagcagtatataccgccacaataactgaaatcagagatactggtgtaatggtaaaattatatccaaatatgactgcggtactgcttcataacacacaacttgatcaacgaaagattaaacatcctactgccctaggattagaagttggccaagaaattcaggtgaaatactttggacgtgacccagccgatggaagaatgaggctttctcgaaaagtgcttcagtcgccagctacaaccgtggtcagaactttgaatgacagaagtagtattgtaatgggagaacctatttcacagtcatcatctaattctcagtgatttttttttttaaagagaattctagaattctattttgtctagggtgatgtgctgtagagcaacattttagtagtatcttccattgtgtagatttctatataatataaatacattttaattatttgtactaaaaaaaaaaaaaaaaaaaaaaaaaaaaaa

SEQ ID NO: 1625 - DNA, 423 bp, Homo sapien
atggcgccgaaggtttttcgtcagtactgggatatccccgatggcaccgattgccaccgcaaagcctacagcaccaccagtattgccagcgtcgctggcctgaccgccgctgcctacagagtcacactcaatcctccgggcaccttccttgaaggagtggctaaggttggacaatacacgttcactgcagctgctgtcggggccgtgtttggcctcaccacctgcatcagcgcccatgtccgcgagaagcccgacgaccccctgaactacttcctcggtggctgcgccggaggcctgactctgggagcacgcacgcacaactacgggattggcgccgccgcctgcgtgtactttggcatagcggcctccctggtcaagatgggccggctggagggctgggaggtgtttgcaaaacccaaggtg

SEQ ID NO: 1626 - protein, 141 aa, Homo sapien
MAPKVFRQYWDIPDGTDCHRKAYSTTSIASVAGLTAAAYRVTLNPPGTFLEGVAKVGQYTFTAAAVGAVFGLTTCISAHVREKPDDPLNYFLGGCAGGLTLGARTHNYGIGAAACVYFGIAASLVKMGRLEGWEVFAKPKV

SEQ ID NO: 1627 - DNA, 1155 bp, Homo sapien
aggccacagggcatggatcagccccactgcatctcaagtgaactgtatagccaagtcttaaacctctcacggggcaagcctgacacagaccccctttagatgctcaggcatactgtttccatcccgattccactcttcggctctgacacgtcccttgcaaagtctccgcaggtgctgtgaagagccttccatggtagagatttctcttaagagtgtgatttctcatagggctagtaagggagattgtatacctgttgtccacagtcttcaggcagctccccaggtctctgaaccccagagtgtcgtcattggagagagcagtgactgcgagagatggtggaggccgctaagcatggtagaggctagaggaagtctatccacaggcagttgtgttcccagcaattcctcccatcctgcatggttcacaccaagagaaccttcagatcctaccagcaaccgtagcaccttccacccaggggactcccagaagccagtaaagagaccaggagccacctcaatcagcaggacagcctcactgcccctcttgcagagtcccctttgcccatcctgaatgcacagtctccctgctcatgcccttcagtcccctgcttggctgtatgcactgtctatattgcactgagagaggaagggacagcaggagtgaggtgaagagggcggagagagggggcaggctcggcaccggccctcccagcccggccagcctgagcttgctgccctccagtagagacagaggggcagtgtttgcaagggaggtgtttctgcctgtccctgcctgatgtccctggtggagcaggtacctccgggcgggcaagcctctgatttgcacacctgaaaatcgcggaattgagtttcgatagattgatttttaaaacttttttggagtagggggtataggggaatcatttaatttaaatcattaagattcccctgctcaaacccagattcctgtgtacagatgctatttagagggaatcagaaaaatgccaagccttttctctttgaatgtgctatttttataactgaacttgtacatatgtataaagagagacacatcttccttttactaactggataaaaaaatcttaaataaaatggagtgagataattttaaaaaaaaaaaaaaaaaaaaaaaaa

SEQ ID NO: 1628 - protein, 126 aa, Homo sapien
MVEISLKSVISHRASKGDCIPVVHSLQAAPQVSEPQSVVIGESSDCERWWRPLSMVEARGSLSTGSCVPSNSSHPAWFTPREPSDPTSNRSTFHPGDSQKPVKRPGATSISRTASLPLLQSPLCPS

SEQ ID NO: 1629 - DNA, 2055 bp, Homo sapien
ggagggagaggctgaatgttggctcggtaattgagaggagcggccgctccagagcttcctcccggggcgcccccctcagtccgtccgcgcttctcagccgccagtctcctggccgcgcagtccccgcggacggccgggccgcggagaccctcgcagaagaggcgctgccggcggcgaggactggccggcggcatccgaggcgcgcgccccaccgccacccccacccgcctgccagccggtccctccggccgccgccatgtcctcctcctcttcctcccccagggagacgtacgaggaggaccgggagtacgagagccaggccaagcgtctcaagaccgaggagggggagatcgactactcggccgaggaaggcgagaaccgccgggaagcgacgccccggggcgggggcgatggcggcggcggcggccggagcttctctcagccggaggcaggtggaagtcatcataaagtttctgtttcacccgtcgtccatgttcgaggactctgtgaatctgtggtggaagcagacctcgtggaagcgctggaaaaatttgggacaatatgctatgtgatgatgatgccatttaaacgacaggctctagtggaatttgaaaacatagatagtgccaaagaatgtgtgacatttgctgcagatgaacccgtgtacattgctggtcaacaggcttttttcaactattctacaagcaaaaggatcactcggccaggaaatactgatgatccatcaggaggcaacaaagttcttctgctctcaattcagaatccgctttatccaattacagtggatgttttatatactgtatgcaaccctgttggcaaagtgcaacgtattgttatattcaagagaaatgggatacaagcaatggttgagtttgaatcagtcctttgtgcccagaaagctaaagcagcactcaatggagctgatatatatgctggatgttgcacactaaaaattgaatatgcacggccaactcgtctaaatgttattaggaatgacaatgacagttgggactacactaaaccatatttgggaagacgagatagaggaaagggtcgccagagacaagccattttgggagaacacccttcttcgtttagacatgatggctatggatcccatggtccattattgcctttaccaagtcgttacagaatgggctctcgagatacacctgaacttgttgcttatccattaccacaggcttcttcctcttacatgcatggaggaaatccctctggttcagttgtaatggttagtggattacatcaactaaaaatgaattgttcaagagtcttcaacctgttctgcttatatggaaatattgagaaggtaaaatttatgaagaccattcctggtacagcactggtagaaatgggtgatgagtatgctgtagaaagagctgtcacacaccttaataatgtcaaattatttgggaaaagacttaatgtttgcgtgtctaaacaacattcagttgttccaagtcaaatatttgagctggaggatggtaccagcagctacaaagattttgcaatgagcaaaaataatcgctttacaagtgctggccaagcatctaagaatataatccagccaccctcctgtgttttgcattattataatgttccattgtgtgtcacagaagagaccttcacaaagttgtgtaatgaccatgaagttcttacattcatcaaatataaagtgtttgatgcaaaaccttcagccaaaacactttctgggctattagaatgggagtgcaaaactgatgcagtagaagcccttacggcactgaatcactatcagataagagtgccgaatggttccaatccctatacattgaagctttgcttttctacatcatcccatttataagaagagaagagcatgttagaatttatgttcacctttattacaatttcaaagctacacttcattaaaaaaaaatctaaaatggttgatctcatgttgccttgcttactttaagatcctgttctgtaataaacatattttgccttgagtaaaaaaaaaaaaaaaaaaaaaaa

SEQ ID NO: 1630 - protein, 542 aa, Homo sapien
MSSSSSSPRETYEEDREYESQAKRLKTEEGEIDYSAEEGENRREATPRGGGDGGGGGRSFSQPEAGGSHHKVSVSPVVHVRGLCESVVEADLVEALEKFGTICYVMMMPFKRQALVEFENIDSAKECVTFAADEPVYIAGQQAFFNYSTSKRITRPGNTDDPSGGNKVLLLSIQNPLYPITVDVLYTVCNPVGKVQRIVIFKRNGIQAMVEFESVLCAQKAKAALNGADIYAGCCTLKIEYARPTRLNVIRNDNDSWDYTKPYLGRRDRGKGRQRQAILGEHPSSFRHDGYGSHGPLLPLPSRYRMGSRDTPELVAYPLPQASSSYMHGGNPSGSVVMVSGLHQLKMNCSRVFNLFCLYGNIEKVKFMKTIPGTALVEMGDEYAVERAVTHLNNVKLFGKRLNVCVSKQHSVVPSQIFELEDGTSSYKDFAMSKNNRFTSAGQASKNIIQPPSCVLHYYNVPLCVTEETFTKLCNDHEVLTFIKYKVFDAKPSAKTLSGLLEWECKTDAVEALTALNHYQIRVPNGSNPYTLKLCFSTSSHL

SEQ ID NO: 1631 - DNA, 3362 bp, Homo sapien
ggcgggcgagcaagcgagcggcgtctccaccagcatctgccgcggccgcctttgcccgaagcccggggacgaaccgacggaccgaccgcctggcgcacggacgcgggcgctcgctttgtgttcggggctagcgtcggcgaggcttgagcttgcagcgcgcggcttccctgctttctcgcggccaccccggctccggcggcctcggcgcgcgaggggctggaggtgcgggagccgctctccgccggtcggtccccgcgcggctgagcccaggccgccagcgccgcggccccgtgcggtgtccctgagctcctgctccccgccgggctgctccgagcaacggtgcttcggagctccaaactcgggctgccggggcaagtgtcttcatgaacccagaggatgtccgggaagcactacaagggtcctgaagtcagttgttgcatcaaatacttcatatttggcttcaatgtcatattttggtttttgggaataacatttcttggaattggactgtgggcatggaatgaaaaaggagttctgtccaacatctcttccatcaccgatctcggcggctttgacccagtttggctcttccttgtggtgggaggagtgatgttcattttgggatttgcagggtgcattggagcgctacgggaaaacactttccttctcaagtttttttctgtgttcctgggaattattttcttcctggagctcactgccggagttctagcatttgttttcaaagactggatcaaagaccagctgtatttctttataaacaacaacatcagagcatatcgggatgacattgatttgcaaaacctcatagacttcacccaggaatattggcagtgctgtggggcttttggagctgatgattggaacctaaatatttacttcaattgcacagattccaatgcaagtcgagagcgatgtggcgttccattctcctgctgcactaaagatcccgcagaagatgtcatcaacactcagtgtggctatgatgccaggcaaaaaccagaagttgaccagcagattgtaatctacacgaaaggctgtgtgccccagtttgagaagtggttgcaggacaatttaaccatcgttgctggtattttcataggcattgcattgctgcagatatttgggatatgcctggcccagaatttggttagcgatatcgaagctgtcagggcgagctggtagaccccctgcaaccgctgctgcaagacactggacagacccagctttcgggaccctcccgcgtgccgaactgatcttcgagctgcatggacctaatcacagatgcagcctgcagtctcgcctaatggagctgccattaggggagtgtaaaactgggaaatgctgctcactgacagaattaaaaaaaaaaataaccagtatgaaagtcgttgcgccgtgaatctctactgtagccatgaatttatggacagttagatgcttaccaaaaaagaaaaaaagggagggtaggggacccagatgtacttgaatgtgcagaaaatacattcttgtcctcatcttccgtaattggagggctgggagaggcagctttgctcttcaccacaccttggacggaccaccttctttctgttccatggcctgaaggagtgcatctcctcaaagactcagcccctcacctgggagggcagtggtttgtgggcatccctccatgtacattttaggaaacacttgcaactctcatctgaagaagaaaacaactcatctttgggttcagattttgtgatggtattcagcaagtcacttgggcgagcacacttggtctatcctggaaagtctccttataagagaagttgtgtatttcatgtgcaccgagcaagggcattggaagacgtcatgaggctgtattttagcaggactgatcgtttttctaagtagacctgagctttgtttatcagtgaaattcaaggagaaaatgaggttaatgaagaggtatcagttaaatatccccttcttctcaccctgccaaaattagcagttggatttttggaaactctggaatattctgggtcattttgttttgtatgtttgttgtttttcgtcttccaaaggtgaaagctatgatacagttccacttaaattttagtgttttcttactcagctcaagcattaatttttgattaagtcttaatctgcatgacctgtgaatctgaatccatcatctccctttcctgccagcttttctacaaacattgaaatatgttatttggtcagcacttatttcctaggttcacagccttgggaggttgtggcatgtcctcccagtctggctgggaagagaccagctgtaccatccaaatgcttccctggtcttgatgatctcttccagagtcgatctgagtggccttttctgcaccctccccttctttctctttgaatggaattaaacccaatttggaaacaacattgacccagtcaaaagcttctaatggtttctttttcttcctccagttttagtttgcttttattaaaaaaagaaaatagtgcatggccatagctccttcagttctcttattgcagactaaccatcaggatggtatcaaagcacaaatactttggaggggaatgcgttgaactggggcaagtactctgtaacacaaagtgggaaaccacttcctggtgctgccgctcctgcccccactttaggtgggagggacgagttttgccctctagattttaatccagctggtgtccaccggatgttgccctcctggggagcagatatcagtctgtggaactctgggaaaaccacaggcacatttttcggtgcggacagatttgccagcacataactgggcagccagctagaatactttgtggaaattaagcgaggttttccatttcagccccatggtgcatggtggtggccgatgaatgtgtcagtctgctcagagaaaggacaaaaaggaaattattttcaaaactgtgttcactgtttgggtgtgtgtatggctctgcatgtgtgtgtttttgtctctgtataggtagaggtattcacatcttactccgactgtaaggttgtcttacttcatctctgcccccaccacagttgccattttgtaatgtccttccaacatggagaagacacgagctctctccagttggcatcatttgtcttttttgttgattgcctcattctccagtgaactccatctggccaattgattcagaatcaggcaagatccctgccctttggcacatccactgaaaggccaaacagcaagtccgagtgagttttaaatattaattaatcaccctttattttttacacttgagagtgattgtaataaaggctgtcattaataaacttggttctaccttaaaaa

SEQ ID NO: 1632 - protein, 268 aa, Homo sapien
MSGKHYKGPEVSCCIKYFIFGFNVIFWFLGITFLGIGLWAWNEKGVLSNISSITDLGGFDPVWLFLVVGGVMFILGFAGCIGALRENTFLLKFFSVFLGIIFFLELTAGVLAFVFKDWIKDQLYFFINNNIRAYRDDIDLQNLIDFTQEYWQCCGAFGADDWNLNIYFNCTDSNASRERCGVPFSCCTKDPAEDVINTQCGYDARQKPEVDQQIVIYTKGCVPQFEKWLQDNLTIVAGIFIGIALLQIFGICLAQNLVSDIEAVRASW

SEQ ID NO: 1633 - DNA, 1961 bp, Homo sapien
gggaacccacaggcgcgcgcgccgctgcttctggccgggcgcgggtcgtggtgcaccacgggagcgccgcaccggccggcatggaggagcgcggcgattccgagccgacccccggctgcagcggcctgggtccgggcggtgttcgcggctttggcgacggcggtggagctccttcgtgggcccctgaggacgcctggatgggcactcaccctaagtatctagaaatgatggaattagatataggagatgccacccaagtttatgtagcgttcttggtttacctggacctcatggaaagcaaaagctggcatgaagtaaactgtgtaggattaccagaactccagctcatctgccttgttggtactgagatagaaggggaggggttacagactgtggtgcctacccccatcactgcttccctcagccataacaggataagggagatcttgaaggcatctcgaaagttgcaaggtgatccagatttgccgatgtcttttactttggccatagtggagtctgattctacaatagtctattataaacttactgatggatttatgctgccagaccctcagaatatttctcttagaagatgacatccatgtttcctgatgcttgttttattcatacaagattggatttgagacccatcagactgcttcatcttttatctcagaaatagggttgacgtacatagtgagggttgacttccccattccataaggttttcattctgaagagtaaaacttccccaggtagaagactttctccttcttaaaaaatatagggtgatttctttaaaactttgttatctagagacagtttaattacagttatatacaggtttatgcctaggatgtattcagatgggtgggacctgtgtgctgcttttgtcatcccacactcaaagttgtctctttgtttcttgctgccactgccagctcattgttgagactgccatttctttctcttactcagctctccccagtgccttttggccactgcagctaccgtagaatggcattttatatgtaccttgtcacccacttctgtttactttttcctctccagtaaaaagtaaaagatttctttcaattggtcttcccattgcagttactgttatttctcttttttggttaactttaaatcaaaactcaaaatatgttcatccagagtgtgtcttaagtaacttacgtgtcttaagtaacagggaccagagacatgttacctacaagagttctgggctatccttttcattcttatcacatatcatagcttgaatattacaacagtgtgggagagaatcaaccgtaaaaatgtcttcattaattagacccagttattccacttttgttaatgtctctcaaattgtacaaagtataaaaaattatatgcacaaagatgttccaagtgacattacttttagtagcccaaattataaaccactttaaagtttggggtaaagattggcaaactttttctataaagggccagaaagtaactattttaggtttttaaacctactgtctctgtcataacttgtcaacactgctgtatgaagcacaaaagcagccatagacaatacataaacaatacgggcgtggctttgttccagtaaaactttgtttacaaatgtggtgccatagtttgtcatccctgggtctaggaaatagtcaataaacagatatatacaaatgatacataatgtacttattaaaaattagtaatgaatattattaaaaacatgaaaatattaccttaagtaaaaattgcaagacggaaaagtgtataagtgggtgtaatcatggctgaaataacagaccaagcatatgataaaaagataacaaagtaaatcaaattactaactggttatagtgggataggaggcagaaaatggatgactttgtcttttctcaatgtttttatttgtattttataataaaaatgttttaaaattaaaa

SEQ ID NO: 1634 - DNA, 421 bp, Homo sapien
gtcgtggcattgaggggcatccctcctagaacctccaggaaaagctcgcggaagacgaggttctgcggagagagaggctccaagcagtctgggaagtgtagtccagttggcttagcagtagtttcgttgggggggagccgaggttccgggaaggggctaggccggcttgaaaagagctggaacacaagaagtgtttgtttaatgaatgacgtacacatttaagatctgtttggacgcggaggataatcctgtgaattgctaatagttcactgggtttggcccttagtgttgacttcagtatgctgagacggaaaccaacacgcctagagctaaagcttgatgacattgaagagtttgagaacattcgaaaggacctggagaccccgtaagaaacagaaggaagaatgtgggaaggttgtag

SEQ ID NO: 1635 - DNA, 2156 bp, Homo sapien
gcgcggacctttcaacaagggctttattaattctcacgctgcggccctggaaagcgatggaggtggcggctaattgctccctacgggtgaagagacctctgttggatccccgcttcgagggttacaagctctctcttgagccgctgccttgttaccagctggagcttgacgcagctgtggcagaggtaaaacttcgagatgatcaatatacactggaacacatgcatgcttttggaatgtataattacctgcactgtgattcatggtatcaagacagtgtctactatattgatacccttggaagaattatgaatttaacagtaatgctggacactgccttaggaaaaccacgagaggtgtttcgacttcctacagatttgacagcatgtgacaaccgtctttgtgcatctatccatttctcatcttctacctgggttaccttgtcagatggaactggaagattgtatgtcattggaacaggtgaacgtggaaatagcgcttctgaaaaatgggagattatgtttaatgaagaacttggggatccttttattataattcacagtatctcactgctaaatgctgaagaacattctatagctaccctacttcttcgaatagagaaagaggaattggatatgaaaggaagtggtttctatgtttctctggagtgggtcactatcagtaagaaaaatcaagataataaaaaatatgaaattattaagcgtgatattctccgtggaaagtcagtgccacattatgctgctattgagcctgatggaaatggtctaatgattgtatcctacaagtctttcacatttgttcaggctggtcaagatcttgaagaaaatatggatgaagacatatcagagaaaatcaaagaacctctgtattactggcaacagactgaagatgatttgacagtaaccatacggcttccagaagacagtactaaggaggacattcaaatacagtttttgcctgatcacatcaacattgtactgaaggatcaccagtttttagaaggaaaactctattcatctattgatcatgaaagcagtacatggataattaaagagagtaatagcttggagatttccttgattaagaagaatgaaggactgacctggccagagctagtaattggagataaacaaggggaacttataagagattcagcccagtgtgctgcaatagctgaacgtttgatgcatttgacctctgaagaactgaatccaaatccagataaagaaaaaccaccttgcaatgctcaagagttagaagaatgtgatattttctttgaagagagctccagtttatgcagatttgatggcaatacattaaaaactactcatgtggtgaatcttggaagcaaccagtaccttttctctgtcatagtggatcctaaagaaatgccctgcttctgtttgcgccatgatgttgatgccctactctggcaaccacactccagcaaacaagatgatatgtgggagcacatcgcaactttcaatgctttaggctatgtccaagcatcaaagagagacaaaaaattttttgcctgtgctccaaattactcgtatgcagccctttgtgagtgccttcgtcgagtattcatctatcgtcagcctgctcccatgtccactgtactttacaacagaaaggaaggcaggcaagtaggacaggttgctaagcagcaagtagcaagcctagaaaccaatgatcctattttaggatttcaggcaacaaatgagagattatttgttcttactaccaaaaacctctttttaataaaagtaaatacagagaattaattattctaacatattggcctctttgtactggaaaagtattcagtggtacctggaggtctggacagttatactgtaacctcttaagttttaatgtgctaaatatatcttgtatgattttttattttttaataacattggaaatatattcaagagattatgattctgtaaagctgtggaatgaagctgcagatttagagaacattggcttctgaaaaaaaaaaagagtgaagatagtactagcaagtatacttattttttaaaacaggctagaatctcatgttttatatgaaagatgtacaattcagtgtttaaaaataaaaatatttattgtgtaaaaaaaaaaaaaaa

SEQ ID NO: 1636 - protein, 601 aa, Homo sapien [sequence omitted]

SEQ ID NO: 1637 - DNA, 859 bp, Homo sapien
gtcctggggagattggaggggacggcagcgttctgcatgacggaggcgctgccgggccccgggtctgtgggggccgtgctctcagggcgtgtgcgggacgccacctgtgcacacctgctcagagcacggctcctcgcaggggtgaaggggcagaccaacgaaaccagatgagaccaacgacaccatgcgagacacgcttgcagacactgttgttttggaaatgtgcttccctccatctgaaatctcatccctccacccgcccactcgggcagctgtgccgtgggcagggcatgcgctcccctggctgagcaccccagagattctcctgcaccttcctcatgccgcacgctgctcatccgtctccatgtgtgtttagatccatgccattcactgactcactaacacctgcaaaatctttaaggaaaaaagctgaagggtacgaccatgcacatatgtgacctggaaaatgcaaatttagatcttttatgatttaattattattgtttcccatagaagttccctccctttgaaattaatatataatgtataaattctgcactgagccatggcggagctgggcagcccctaggttagagtggagacggaggcccaggcgcaggggtcacacctcatctggtttccttcccatctcacagcttagcttgtgcttctcaacaccaagtctttaagagcaataaaaactacaccatgaatgtttgaattttttttttttgggggggggagggtggattttgcttttcatccagaaggaaaaggggaggagagctcctttacattttttaaattaaattcataaatcccaaaaaaaaaaaaaaaaaaaaaaaaaaaaaaaaaaaaa

SEQ ID NO: 1638 - DNA, 1070 bp, Homo sapien
ggcacgagggagacggactcttgctatgttgcccaggctggtcttgaactcctggcctcaagcaatcctcctgcctcagcctcccaaagcacggggattacaaaccctgctgagggatgcccaagaagttccagggtgagaacaccaagtcggcagcggcccgggcacggagggcagaggccaaggcggccgctgatgccaagaagcagaaggagctggaggatgcctactggaaggacgacgacaaacacgtcatgaggaaggagcagcgcaaggaggagaaggagaagcggcgcctcgaccagctggaacgtaagaaggagacgcagcgcctactggaggaggaggactccaagctcaagggcggcaaggcgccgcgggtggccacgtccagcaaggtcacccgggcccagatcgaggacacgctgcgccgagaccatcagctcagggaggccccggacacagccgagaaagccaagagccatctggaggtgccgctggaggagaacgtgaaccgccgcgtgctggaggagggcagcgtggaggcgcgcaccatcgaggacgccattgcagtgctcagcgtggcggaggaggcggccgaccggcacccagaaagacgcatgcgggcagccttcacagcctttgaggaagcccagctgccgcggctcaaacaagagaaccccaacatgcggctgtcgcagctgaaacagctgctcaagaaggagtggctccgctctcctgacaaccccatgaaccagcgggccgtgcccttcaatgcccccaagtgagcccagaacttggggagccagttcacccacggggtggtccaggtcacgactctgcacgcccttaggccaggtcagctgcgagggtcacagagcgttccgggggccaaggcgccgggccccggggccatgctcttatcaccagccacccgtcctcccgccagagggtccctgccccgagtgacaccccatcccctcccatcccccggcgcgtgtgtgtagagcctcagggctgagtgcccaataaaggtggcggcaaggctaaaaaaaaaaaaaaaaaaaaaa

SEQ ID NO: 1639 - protein, 223 aa, Homo sapien
MPKKFQGENTKSAAARARRAEAKAAADAKKQKELEDAYWKDDDKHVMRKEQRKEEKEKRRLDQLERKKETQRLLEEEDSKLKGGKAPRVATSSKVTRAQIEDTLRRDHQLREAPDTAEKAKSHLEVPLEENVNRRVLEEGSVEARTIEDAIAVLSVAEEAADRHPERRMRAAFTAFEEAQLPRLKQENPNMRLSQLKQLLKKEWLRSPDNPMNQRAVPFNAPK

SEQ ID NO: 1640 - DNA, 655 bp, Homo sapien
  Unsure 567: Unknown base
ttttttttatcattgacaatgtttattatcaagaaactttaggttttttaaaagaatgctcgttttagaatacaccaagaggacactctgtgacaggacatatacaaacaaggataattaaaatattaaatactatctaaattaaaagaccataattcaaattgctaattataatatttgtgtcggtagaaataactatagttccccttcatgaaattcacccccacgttctcatgaagactatgacgtctcaccacaatttcagttatttaatttacaataatcaatgctgagttttctgtgctgaagcatgcactgttacagaaagcacaaaatcctatttacagggatttttagttttctttaaaatgtatctcaagcatcttttaaagtgcgagctacaaataggttgtatccttaatgaaaaaggcttctttctaaaagaagtatgagatagctatccaatactgcaggaacagttatataactaaccgaaggaaccagcagcactctgctaactctgttttagtgtagcaacctccttcttggtgttctactaccagccanacatgtactccattgctttggataccagactttcatctttttttggcgtttgtctgtcagaaataccctgataatcactagtagaggc

SEQ ID NO: 1641 - DNA, 2138 bp, Homo sapien
ggcagatctcacgagagaggatttggcgccctcctctgtggattctggccaggccgggttcggcggttgctgtgagagcgggcttcccaacaccatgccgtccgccttctctgtcagctctttccccgtcagcatcccagccgtgctcacgcagacggactggactgagccctggctcatggggctggccaccttccacgcgctctgcgtgctcctcacctgcttgtcctcccgaagctacagactacagatcgggcactttctgtgtctagtcatcttagtctactgtgctgaatacatcaatgaggcggctgcgatgaactggagattattttcgaaataccagtatttcgactccagggggatgttcatttctatagtattttcagccccactgctggtgaatgccatgatcattgtggttatgtgggtatggaagactttgaatgtgatgactgacctgaagaatgcacaagagagaagaaaggaaaagaaaaggagaaggaaagaagactgaggggcagcagctgcttggagtttgcgtccttcccgtccacccagtgcagctcccagtgctgcagtgtgcgtggcgtgggcatccttccagctgactcatggtttgaaaaaccgttgttttatttaaatatccacagtggtagggcacacactgaagttggcttttcagccagcactgaatgtatccatcaggacatgcgtcttcaggtgcctgatctttgtagtcaggctgtgggaacggtctctgcagagcttcataactgggaatttgatttgaagaagtccatgtcatatgtgtaactagtactaattataaatataaaatacacaatataaaatatgaaactcaataataaacagtgccacctgtacatgggcaccatgccctcctcctcgtgctgtgttttctagtgcatgccacagttcgcagtagagggtgttttcaccttccaagacatggggcaaagtttggagacacctggttgtcactggagggggtggtgctcctggcttctcctgtggagcccggggtgatgcataaaatcctgtgtgcctgggtcagccgcatcacagacaatgacttgacatgaaatgtcagctgtgctggggcagagagaccttggaaggaagctcttggaaaatacgttgtatctcagtttgatgaaccaattcacaagaggctaggccctctctagcaaagttatgggctgctttactgaaaacagaatggaagccctgaagtcaacactccatggagaagcgtgtctttcctaatgtcctggtgttctgttgatttaggtgcttgggaacacaatgctcccagttctgttaggacaggcatactgttactttgcaatatccactttataaaatagctcctgcccagtggctcttggttcctgtcaaatgtggacctgtagtttaagaatgacaggtggttagagacccagatatttaaaaataggtgttcaataagggaatactgattgtgcattgtatctggatagcatgcctaattgtgcatttctgaaagttaccaattcaaaatgtaattggaacagttatctttgattagacaagcctgggaagagaatgttgaggtgcagagctcaccagccaagttcatgcccctctcgggcctttgtggctgagaagtgggacagaaagatgattaaggtaatgtgtcctccctgtagcattgtccagggccgttgtgtagatatttgacttcactgacagaaaagaaaccagggagtttgtagagactgtgcatttttagtataacattttcaccatctgatatggtttggctttgtgtccccacccaaattgcatctcaaattgtaatccccatgtgtcaagggagggacctgatgggaggtgatgggatcatgggggtggtttcccctatgttgttatcataatagagagggagttctcacaagatctgctggttttaaagacagcagtttcccctgctgtcactgtctctctcctgctgccttgtgaagaaggtgcttgtttctccctctgccatgattgtaagtttcccgaggcctccccggccatgtggaactgagtcaattaaacttcttgtttataaagtaaaaaaaaaaaaaaaa

SEQ ID NO: 1642 - DNA, 3164 bp, Homo sapien
gcagccccggcggccgaacgcccgcggcgcgggactccatcgtcagagaagtcattcagaattcaaaagaagttctaagtttattgcaagaaaaaaaccctgccttcaagccggttcttgcaattatccaggcaggtgacgacaacttgatgcaggaaatcaaccagaatttggctgaggaggctggtctgaacatcactcacatttgcctccctccagatagcagtgaagccgagattatagatgaaatcttaaagatcaatgaagataccagagtacatggccttgcccttcagatctctgagaacttgtttagcaacaaagtcctcaatgccttgaaaccagaaaaagatgtggatggagtaacagacataaacctggggaagctggtgcgaggggatgcccatgaatgttttgtttcacctgttgccaaagctgtaattgaacttcttgaaaaatcaggtgtcaacctagatggaaagaagattttggtagtgggggcccatgggtctttggaagctgctctacaatgcctgttccagagaaaagggtccatgacaatgagcatccagtggaaaacacgccagcttcaaagcaagcttcacgaggctgacattgtggtcctaggctcacctaagccagaagagattccccttacttggatacaaccaggaactactgttctcaactgctcccatgacttcctgtcagggaaggttgggtgtggctctccaagaatacattttggtggactcattgaggaagatgatgtgattctccttgctgcagctctgcgaattcagaacatggtcagtagtggaaggagatggcttcgtgaacagcagcacaggcggtggagacttcactgcttgaaacttcagcctctctcccctgtgccaagtgacattgagatttcaagaggacaaactccaaaagctgtggatgtccttgccaaggagattggattgcttgcagatgaaattgaaatctatggcaaaagcaaagccaaagtacgtttgtccgtgctagaaaggttaaaggatcaagcagatggaaaatacgtcttagttgctgggatcacacccacccctcttggagaagggaagagcacagtcaccatcgggcttgtgcaggctctgaccgcacacctgaatgtcaactcctttgcctgcttgaggcagccttcccaaggaccgacgtttggagtgaaaggaggagccgcgggtggtggatatgcccaggtcatccccatggaggagttcaaccttcacttgactggagacatccacgccatcaccgctgccaataacttgctggctgccgccatcgacacgaggattcttcatgaaaacacgcaaacagataaggctctgtataatcggctggttcctttagtgaatggtgtcagagaattttcagaaattcagcttgctcggctaaaaaaactgggaataaataagactgatccgagcacactgacagaagaggaagtgagtaaatttgcccgtctcgacatcgacccatctaccatcacgtggcagagagtattggatacaaatgaccgatttctacgaaaaataaccatcgggcagggaaacacagagaagggccattaccggcaggcgcagtttgacatcgcagtggccagcgagatcatggcggtgctggccctgacggacagcctcgcagacatgaaggcacggctgggaaggatggtggtggccagtgacaaaagcgggcagcctgtgacagcagatgatttgggggtgacaggtgctttgacagttttgatgaaagatgcaataaaaccaaacctgatgcagaccctggaagggacacctgtgttcgtgcatgcgggcccttttgctaacattgctcacggcaactcttcagtgttggctgataaaattgccctgaaactggttggtgaagaaggatttgtagtgaccgaagctggctttggtgctgacatcggaatggagaaattcttcaacatcaagtgccgagcttccggcttggtgcccaacgtggttgtgttagtggcaacggtgcgagctctgaagatgcatggaggcgggccaagtgtaacggctggtgttcctcttaagaaagaatatacagaggagaacatccagctggtggcagacggctgctgtaacctccagaagcaaattcagatcactcagctctttggggttcccgttgtggtggctctgaatgtcttcaagaccgacacccgcgctgagattgacttggtgtgtgagcttgcaaagcgggctggtgcctttgatgcagtcccctgctatcactggtccgttggtggaaaaggatcggtggacttggctcgggctgtgagagaggctgcgagtaaaagaagccgattccagttcctgtatgatgttcaggttccaattgtggacaagataaggaccattgctcaggctgtctatggagccaaagatattgaactctctcctgaggcacaagccaaaatagatcgttacactcaacagggttttggaaatttgcccatctgcatggcaaagacccacctttctctatctcaccaacctgacaaaaaaggtgtgccaagggacttcatcttacctatcagtgacgtccgggccagcataggcgctgggttcatttaccctttggtcggaacgatgagcaccatgccaggactgcccacccggccctgcttttatgacatagatcttgataccgaaacagaacaagttaaaggcttgttctaagtggacaaggctctcacaggacccgatgcagactcctgaaacagactactctttgcctttttgctgcagttggagaagaaactgaatttgaaaaatgtctgttatgcaatgctggagacgtggtgaaataggccaaagatttcttcttcgttcaagatgaattctgttcacagtggagtatggtgttcggcaaaaggacctccaccaagactgaaagaaactaatttatttctgtttctgtggagtttccattatttctactgcttacactttagaatgtttattttatggggactaagggattaggagtgtgaactaaaaggtaacattttccactctcaagttttctactttgtctttgaactgaaaataaacatggatctagaaaaccaaaaaaaaaaaaaaaaa

SEQ ID NO: 1643 - DNA, 514 bp, Homo sapien
gtcctctctgctctcgcggccgactcgcaagatggcgccgcagaaagacaggaagcccaagaggtcaacctggaggtttaatttggaccttactcatccagtagaagatggaatttttgattctggaaattttgagcaatttctacgggagaaggttaaagtcaatggcaaaactggaaatctcgggaatgttgttcacattgaacgcttcaagaataaaatcacagttgtttctgagaaacagttctctaaaaggtatttgaaataccttaccaagaaataccttaagaagaacaatcttcgtgattggcttcgagtggttgcatctgacaaggagacctacgaacttcgttacttccagattagtcaagatgaagatgaatcagagtcggaggactaggcaaaggctccccttacagggctttgcttattaataaaataaatgaagtatacatgagaaataccaagaaattggcttttagtttatcagtgaataaaaaatattatactcttg

SEQ ID NO: 1644 - protein, 132 aa, Homo sapien
SSLLSRPTRKMAPQKDRKPKRSTWRFNLDLTHPVEDGIFDSGNFEQFLREKVKVNGKTGNLGNVVHIERFKNKITVVSEKQFSKRYLKYLTKKYLKKNNLRDWLRVVASDKETYELRYFQISQDEDESESED

SEQ ID NO: 1645 - DNA, 2859 bp, Homo sapien
ctaactttgagtcaacgctgactacagcaccaggactgctcacttccagcttctgctgacacctgccctcgtttagtctttcttggtggctgcaggttcagtagaaactctatgccaggctttgtctccgggacataggagagtgctggtgctcagtcatgtttgttgaatgagtaataaatggtaaaggttgttgctgccccgagacgcttcaagaggaagcagccccctaaccccagctgggaggaggaggaagaatcctgggctggtcagttggggaaggagctgagcaggccgggccacctgggctgacacagcacgagcaccacgtggatgggatgcctgcagtcagctgcaggagggcctcgtcgggaggccacagggcccctcttttgtcttgaatggagacctccaaggctccaggacataaagggccttggccaagctgttcctggccacctggccacatctccagctgcaccagttctcacctccattccccacggccccagctgtcaggttttagggtggcagagagctccatgcaccccctggccttggcctcttctggggcttagagctccaggacttttgggcctgtgcaccctcagcgtcccctcttacgactccggcgaggacggccaggtgcctggtggactcttgcacgtgctcagccacgagacctcatgtgcgctgtcctgagcccacctgtgtcctcagatgttccaggtcatccagccagagcgtgcgctgtacatccaggccaacaactgcgtggaggccaaggactggatcgacattctcaccaaagtgagccagtgcaaccagaagcgcctcaccgtctaccacccgtccgcctacctgagcggccactggctgtgctgtagggcgccatccgactcggctccgggctgctcgccctgcactggcggcctcccagccaacatccagctggacattgatggggaccgtgagacggagcgtatctactccctcttcaacttgtacatgagcaagctggagaagatgcaggaggcctgtgggagcaaatctgtgtatgacggcccggagcaggaggagtattcgacgttcgtcattgacgacccccaggagacctacaagacgctaaagcaagtcatcgctggggttggggctttggagcaggagcacgcccagtataagagggacaagttcaagaagacgaaatatggaagccaggagcaccccatcggagacaagagcttccagaactacatccggcagcagtccgagacctccactcattccatttaaagtctgcgggacgcgcccagtggcgccagcaagctgcccatgcaaagccgcagcctttgggagggagaagagaaggaagagcgcagagccggcaaagtgagatgcacgccgtcccggcccatagacaagtggcgctggggtttccctctcccagaaccgctgccaccaccgccacgccctccgcagaaagcccacctggccctgtggaacgtgtcgtcatttgattctgtgctttttgctccttgtttgtggggatctggggatcagctgaaggatcaggaagtgtgggctgtgccctagccacaccacagccagcctcagggagccacggcccgtctagtcgactgtgacatgcacctccggccgtgtgtgcgtcagtctcgtgcacgtctgtcttgcgttgcacggtgcgtgtgacgctgggctctgtggctctgtgcccgggaggcctgctggccccgcctcggctttcggcttcatcacattgggaggttcagagcattactctcccactgtgcctgccatccaggcagccatgggaggcggcctccctgttccactttcgaggttcgtttgattcctggctgaggggtcagttttatggctgggaggtgcagaattacacagaagtcccagtctgaggatgtccttggtgcttgggggatacgggttctgtccacagagtcccttggagggaaaggtgtgggctccagcttctccaggcgtctgcggagcccacagttgaagcccacatcgttttgctgttgaatggggtttaaaatcagaattaacatttgccaccccccgtggaagtttgaagattttaaaaatagaaatgtacatttttcaagctgtttttctttatgtttttgaaggaccatttttaattagctctttgatacaaagtaactcagaacgtcaaaacctatacccactaaagggaaggctgccgggaaggcaaatggaacaggaatggagcctgtctcaggaaggccagctgcaggtcctccagaaaatcaaagaagggaagaaactctgagtttgaggtacaggggcttcggggtgcagacgtccctccagggcccatggtcagtattgcacctgtgttatgaacccccagatgctgtgcagggcaggggcgggggctgctgttttattggggaggggagcatcctaaaaatggggtccaggcagacccctccagacctcacactgccgaggaggcctttcccaaagggcgtcctcccgggatgcagacggcaggtgtgtgggaagcgccgtttaaatacacagcacgacgtatccttgtaccgacttctcccggttcttgtttgaaaatactgtagttcaggctcttgatctagatggcagataggaactttcttgtcacaaaaatactggaggaaaatgttgtaaaaatagacttttggacacacagctgttggggctgcactgagctgcaatttttaacatggatttataacttaatgtttctgtttataaaatactaatgatttgcaatgtattttactggccaattaaaacagatgttttattctttctgaa

SEQ ID NO: 1646 - protein, 190 aa, Homo sapien [sequence omitted]

SEQ ID NO: 1647 - DNA, 4642 bp, Homo sapien
atggcaaagcaaccttctgatgtaagttctgagtgtgaccgagaaggtagacaattgcagcctgcggagaggcctccccagctcagacctggggcccctacctccctacagacagagccacaagacaggagcccagcacccatgagttgtgacaaatcaacacaaaccccaagtcctccttgccaggccttcaaccactatctcagtgcaatggcttccatgaggcaggctgaacctgcagatatgcgcccagagatatggatcgcccaagagttgcggcgtattggagacgagtttaacgcttactatgcaaggagggtatttttgaataattaccaagcagccgaagaccacccacgaatggttatcttacgactgttacgttacattgtccgcctggtgtggagaatgcattgacaggttctttgcggagccgagataccatgcagacattttgcttgttcaaaccaacaagacccagcaccgcggtctcctggtgccattattatgcagccagcggttctcttgtggagggggcaggtgacgtttcagaagacaccgagctggatgggactacctttctgttcatcaccacacagcagaatttctaatggaagtttgttgtgaatgtaaaggagggagcattctttgctttttaatatacaaaccatggttttttggagcaggattttgtgtaagaatggtgtttacatgcagtgtgttttccccctcaccttcaataaggtttttcaaaaaggaaatggaaactttttaaccaatttgtgaataacttttgtattaaaattttaagaacctacggcctattctcagaggattatgtaacccctgcagtggaaactgagccagctaacttaaaaagctgccttagtttatttttagagattacagaatttttaaacagggagacgtgtgatatactccctcccttccctactattgcctctctgacctttttaaattatttttaataccaaaagagttcttttgaaatggaactgattaaaagggcagagggtctgttgccagcctgcattgatataccagtcccatttgtaaatatttacgtacctttataaattcagttgcatctgtggcaaaatttcagactatttttgcgtctttcctcatcactttttgtgatgcaactccagtctggactcagatgcatagatttggtccagtgtattttcatgataaagtgaaattgagtcagaacaagagttaatatctgcctgtatcttgcacagttcgagcgatctgttattaactgggaagcatttggtgttggttttcattccatttcgacgagcatgttattgggaagtattctgaagaggcaatagcagtaataacaacagacttaagtgctacgcccctttgtgctgctggcttttctggttgcaggctttcccatggtcacaggatgcactgtcagcatcaggtcccagagggccaccgtgtccattacagcagagtccagctgcagcatccagctcacgccctcatgggaattggcacaggcctggggcagggcttctgatggccatttgcttggcctcctgcattttagtccaactcacagtccactagcttcactcctttaaattcactttgaaacaggcctcatcccacttccaccagcaccatagaagaataattctgggcagaagtctgttttttttcatttttccaggacagttggatattgtcaggccacttgtgaccccagccatgtagtgagggtgctctttctctgtgcctgctccttatgagtgcagtggaaggaagccacacactggtcagtcatttcagaggcagcagatgcccagggagacccaagaaagagtcaggttagggagcagtgaaagtgaggagggaagacaattctgtgaactctgtaactcttaaaatttttgaaaactccatcgttaaacaacttttaaaagaaataactaaattttcaaatgagtaagcagtgccaccaactagtgttttgcccgatagaagagccagcatgttcacgttatttaaattaggtggaaaaatctaaacatttttatcttcataatttaaaaaatatatatgtatatattgcatattcactttttcctttaggtagagatgatttcaatccaaatactcttactttaaaaaatttcctttccccaagaatctccttgggactttgacttatttttaaagctgtgttggagctcatcttgttccctgatgtgtctcgagcccattggtagggtcatacaaagcccacggttacaagcagtggtaggattgcagccgtgggcctgctggacacacacatacaccaaagatgtatttggatctgggcaccccctcccaggatccctgtactcacgtgccagtctcctgactagagcactttactctgtttcctcagccctgcagcccctgggagcacacactgggtgcagccctgggccaggcacgggaggccctgccctgtgctgcccaggggctgtgtgcaccacatgagcacatttccctctggcctggcggcctccaggctggctgtggaaacagttcctgaggaaattagagattctatgaattgtaggagtattaaagaccaggctgttggcaccagaacttaaagcgatgactggatgtctctgtactgtatgtatctggttatcaagatgcctctgtgcagaaagtatgcctcccgtgggtatacgtttttaccttttttaaaaaacatttttgtagaaaaaataattaaatcccctttttggaaacttactgcaggttttgtgccttgacaacctctccctatgtgaggtttgtaaaaagtgtcctgtgacttaacacagaaacgcaataaacacacacaaaatagtttcatgagtgattcttcagatgcccttcccaactggttagttgatcaagaattttgggggtgggggttgcggagaaatcaagtttaaaattccttctgattaaaaaaatatagtggaatacaattgtctgccgtttccccttcttaatgtatatattgtgagtatttattagattcgtaggtcatattacttatcaactgagccaaatgtctgtgtgcaattgtgtttcctttaccttgtaaaattttgtacagcataaataagtaaaaaaatcactgtttttctcaactttttcaaaatcaaggattgtaaatattgtagattctttttctgtgtgatgtgtcctactgtttcataatgctgtaacttgtagaaatattgtatatttattttctgcttatttaatgtcttaatttctgaaaagtattaacatccctgtctcccactcccctgccgtcccatgaagttaactcctgagagttgtcgggggtgactggagagctcattgcagaccacgtggtcctccagggtggctctccaccttcgggtcctggtatttccagtcaagtgggtttcaattcttgggctttgccgcccttatgatgaagtgtgtgtttgatgccagtgagaaactcagtctggcaggctacaaaattctactccaagaaatacccagcaaccttctgtttgttccaaagcaactagcttatcatgcaagcaaattttgctgactccaggctttatctttaggaaaacaaaaaaaccaaagtattatcagcaggtgggaaagatttttctattgaaaatttatccctgacaactcagcgtttagaaaagaaataaaatgtgccacttccagaggtgctgcattgcagttgttcagggctagggccaggcaggacaagtgaatgggtgggacaggtggctcctgcctaaggaccacctcaggccactaaccccttgtggacaactgtgagtagctgggttttcccccacctgctgtgcaacttcctgtgctttgaggttggactaacttgtcttcaggagctaattaactgtacagccctccccacgccccacccatacggtcactgcatttggtcagcctgcttcttcaggtcgatgccctccttctgatactccatctccttcaggggaggttggggccccactggactgggtgtcaagatgtgaaagcttatgggagctttaaggagacttcatggtggttccatgcaggtggttctgccatccctgctgatttagcctggtgcctgtgtgtgtccactcacgtacacgtggggtgggggaaacgtgtctacagatgacgctaaatcagttggggtctactctaaacagcattgtgtgtaagaagcatcctcaagctcccagttaagtaacttgactacttttatttgggaatttcagactatagaagctctcttatgttttatgtccagattctgtgaccactagttactgtatcagaactcatcaggtacccacttataaatagcactgatctggctgtatactgatccatcactaacctgttttctaggacccagcgtatgtagcatttgtattgcagtttccctggcttacttgtgttttgcactgatgaattttgacagggtaattgccactttacttgtgcaatactgctgtaaataactgcagatttttaaacaatcttttatgttaattttataaaaataaaactttcaactagttttaaacaaaac

SEQ ID NO: 1648 - protein, 138 aa, Homo sapien
MAKQPSDVSSECDREGRQLQPAERPPQLRPGAPTSLQTEPQDRSPAPMSCDKSTQTPSPPCQAFNHYLSAMASMRQAEPADMRPEIWIAQELRRIGDEFNAYYARRVFLNNYQAAEDHPRMVILRLLRYIVRLVWRMH

SEQ ID NO: 1649 - DNA, 1835 bp, Homo sapien
gtgcagttgcggctccagggccatggcggaggagcagggccgggaacgggactcggttcccaagccgtcggtgctgttcctccacccagacctgggcgtgggcggcgctgagcggctggtgttggacgcggcgctggcgctgcaggcgcgcgggtgtagcgtgaagatctggacagcgcactacgacccgggccactgtttcgccgagagccgcgagctaccggtgcgctgtgccggggactggctgccgcgaggcctgggctggggcggccgcggcgccgccgtctgcgcctacgtgcgcatggttttcctggcgctctacgtgctgttcctcgccgacgaggagttcgacgtggtagtgtgcgaccaggtgtctgcctgtatcccagtgttcaggctggctagacggcggaagaagatcctattttactgtcacttcccagatctgcttctcaccaagagagattcttttcttaaacgactatacagggccccaattgactggatagaggaatacaccacaggcatggcagactgcatcttagtcaacagccagttcacagctgctgtttttaaggaaacattcaagtccctgtctcacatagaccctgatgtcctctatccatctctaaatgtcaccagctttgactcagttgttcctgaaaagctggatgacctagtccccaaggggaaaaaattcctgctgctctccatcaacagatacgaaaggaagaaaaatctgactttggcactggaagccctagtacagctgcgtggaagattgacatcccaagattgggagagggttcatctgatcgtggcaggtggttatgacgagagagtcctggagaatgtggaacattatcaggaattgaagaaaatggtccaacagtccgaccttggccagtatgtgaccttcttgaggtctttctcagacaaacagaaaatctccctcctccacagctgcacgtgtgtgctttacacaccaagcaatgagcactttggcattgtccctctggaagccatgtacatgcagtgcccagtcattgctgttaattcgggtggacccttggagtccattgaccacagtgtcacagggtttctgtgtgagcctgacccggtgcacttctcagaagcaatagaaaagttcatccgtgaaccttccttaaaagccaccatgggcctggctggaagagccagagtgaaggaaaaattttcccctgaagcatttacagaacagctctaccgatatgttaccaaactgctggtataatcagattgtttttaagatctccattaatgtcatttttatggattgtagacccagttttgaaaccaaaaaagaaacctagaatctaatgcagaagagatcttttaaaaaataaacttgagtcttgaatgtgagccactttcctatataccacacctccctgtccacttttcagaaaaaccatgtcttttatgctataatcattccaaattttgccagtgttaagttacaaatgtggtgtcattccatgttcagcagagtattttaattatattttctcgggattattgctcttctgtctataaattttgaatgatactgtgccttaattggttttcatagtttaagtgtgtatcattatcaaagttgattaatttggcttcatagtataatgagagcagggctattgtagttcccagattcaatccaccgaagtgttcactgtcatctgttagggaatttttgtttgtcctgtctttgcctggatccatagcgagagtgctctgtattttttttaagataatttgtatttttgcacactgagatataataaaaggtgtttatc

SEQ ID NO: 1650 - protein, 416 aa, Homo sapien
MAEEQGRERDSVPKPSVLFLHPDLGVGGAERLVLDAALALQARGCSVKIWTAHYDPGHCFAESRELPVRCAGDWLPRGLGWGGRGAAVCAYVRMVFLALYVLFLADEEFDVVVCDQVSACIPVFRLARRRKKILFYCHFPDLLLTKRDSFLKRLYRAPIDWIEEYTTGMADCILVNSQFTAAVFKETFKSLSHIDPDVLYPSLNVTSFDSVVPEKLDDLVPKGKKFLLLSINRYERKKNLTLALEALVQLRGRLTSQDWERVHLIVAGGYDERVLENVEHYQELKKMVQQSDLGQYVTFLRSFSDKQKISLLHSCTCVLYTPSNEHFGIVPLEAMYMQCPVIAVNSGGPLESIDHSVTGFLCEPDPVHFSEAIEKFIREPSLKATMGLAGRARVKEKFSPEAFTEQLYRYVTKLLV

SEQ ID NO: 1651 - DNA, 3828 bp, Homo sapien
cgactccttagagcatggcatggctcagaggtgctggtaaaactgatgggggtttttgctgtccctcccctcagcgccgacaccatgtggatccaggttcggaccatggacgggaggcagacccacacggtggactcgctgtccaggctgaccaaggtggaggagctgaggcggaagatccaggagctgttccacgtggagccaggcctgcagaggctgttctacaggggcaaacagatggaggacggccataccctcttcgactacgaggtccgcctgaatgacaccatccagctcctggtccgccagagcctcgtgctcccccacagcaccaaggagcgggactccgagctctccgacaccgactccggctgctgcctgggccagagtgagtcagacaagtcctccacccacggcgaggcggccgccgagactgacagcaggccagccgatgaggacatgtgggatgagacggaattggggctgtacaaggtcaatgagtacgtcgatgctcgggacacgaacatgggggcgtggtttgaggcgcaggtggtcagggtgacgcggaaggccccctcccgggacgagccctgcagctccacgtccaggccggcgctggaggaggacgtcatttaccacgtgaaatacgacgactacccggagaacggcgtggtccagatgaactccagggacgtccgagcgcgcgcccgcaccatcatcaagtggcaggacctggaggtgggccaggtggtcatgctcaactacaaccccgacaaccccaaggagcggggcttctggtacgacgcggagatctccaggaagcgcgagaccaggacggcgcgggaactctacgccaacgtggtgctgggggatgattctctgaacgactgtcggatcatcttcgtggacgaagtcttcaagattgagcggccgggtgaagggagccccatggttgacaaccccatgagacggaagagcgggccgtcctgcaagcactgcaaggacgacgtgaacagactctgccgggtctgcgcctgccacctgtgcgggggccggcaggaccccgacaagcagctcatgtgcgatgagtgcgacatggccttccacatctactgcctggacccgcccctcagcagtgttcccagcgaggacgagtggtactgccctgagtgccggaatgatgccagcgaggtggtactggcgggagagcggctgagagagagcaagaagaaggcgaagatggcctcggccacatcgtcctcacagcgggactggggcaagggcatggcctgtgtgggccgcaccaaggaatgtaccatcgtcccgtccaaccactacggacccatcccggggatccccgtgggcaccatgtggcggttccgagtccaggtcagcgagtcgggtgtccatcggccccacgtggctggcatacacggccggagcaacgacggagcgtactccctagtcctggcggggggctatgaggatgacgtggaccatgggaattttttcacatacacgggtagtggtggtcgagatctttccggcaacaagaggaccgcggaacagtcttgtgatcagaaactcaccaacaccaacagggcgctggctctcaactgctttgctcccatcaatgaccaagaaggggccgaggccaaggactggcggtcggggaagccggtcagggtggtgcgcaatgtcaagggtggcaagaatagcaagtacgcccccgctgagggcaaccgctacgatggcatctacaaggttgtgaaatactggcccgagaaggggaagtccgggtttctcgtgtggcgctaccttctgcggagggacgatgatgagcctggcccttggacgaaggaggggaaggaccggatcaagaagctggggctgaccatgcagtatccagaaggctacctggaagccctggccaaccgagagcgagagaaggagaacagcaagagggaggaggaggagcagcaggaggggggcttcgcgtcccccaggacgggcaagggcaagtggaagcggaagtcggcaggaggtggcccgagcagggccgggtccccgcgccggacatccaagaaaaccaaggtggagccctacagtctcacggcccagcagagcagcctcatcagagaggacaagagcaacgccaagctgtggaatgaggtcctggcgtcactcaaggaccggccggcgagcggcagcccgttccagttgttcctgagtaaagtggaggagacgttccagtgtatctgctgtcaggagctggtgttccggcccatcacgaccgtgtgccagcacaacgtgtgcaaggactgcctggacagatcctttcgggcacaggtgttcagctgccctgcctgccgctacgacctgggccgcagctatgccatgcaggtgaaccagcctctgcagaccgtcctcaaccagctcttccccggctacggcaatggccggtgatctccaagcacttctcgacaggcgttttgctgaaaacgtgtcggagggctcgttcatcggcactgattttgttcttagtgggcttaacttaaacaggtagtgtttcctccgttccctaaaaaggtttgtcttcctttttttttatttttatttttcaaatctatacattttcaggaatttatgtattctggctaaaagttggacttctcagtattgtgtttagttctttgaaaacataaaagcctgcaatttctcgacaaaacaacacaagattttttaaagatggaatcagaaactacgtggtgtggaggctgttgatgtttctggtgtcaagttctcagaagttgctgccaccaactctttaagaaggcgacaggatcagtccttctctagggttctggcccccaaggtcagagcaagcatcttcctgacagcattttgtcatctaaagtccagtgacatggttccccgtggtggcccgtggcagcccgtggcatggcgtggctcagctgtctgttgaagttgttgcaaggaaaagaggaaacatctcgggcctagttcaaacctttgcctcaaagccatcccccaccagactgcttagcgtctgagatccgcgtgaaaagtcctctgcccacgagagcagggagttggggccacgcagaaatggcctcaaggggactctgctccacgtggggccaggcgtgtgactgacgctgtccgacgaaggcggccacggacggacgccagcacacgaagtcacgtgcaagtgcctttgattcgttccttctttctaaagacgacagtctttgttgttagcactgaattattgaaaatgtcaaccagattctagaaactgcggtcatccagttcttcctgacaccggatgggtgcttgggaaccgtttgagccttatagatcatttacattcaatttttttaactcagcaagtgagaacttacaagagggtttttttttaatttttttttctcttaatgaacacattttctaaatgaattttttttgtagttactgtatatgtaccaagaaagatataacgttagggtttggttgtttttgtttttgtattttttttcttttgaaagggtttgttaatttttctaattttaccaaagtttgcagcctatacctcaataaaacagggatattttaaatcacatacctgcagacaaactggagcaatgttatttttaaagggtttttttcacctccttattcttagattattaatgtattagggaagaatgagacaattttgtgtaggctttttctaaagtccagtactttgtccagattttagattctcagaataaatgtttttcacagattgaaaaaaaaaaaaaa

SEQ ID NO: 1652 - protein, 793 aa, Homo sapien
MWIQVRTMDGRQTHTVDSLSRLTKVEELRRKIQELFHVEPGLQRLFYRGKQMEDGHTLFDYEVRLNDTIQLLVRQSLVLPHSTKERDSELSDTDSGCCLGQSESDKSSTHGEAAAETDSRPADEDMWDETELGLYKVNEYVDARDTNMGAWFEAQVVRVTRKAPSRDEPCSSTSRPALEEDVIYHVKYDDYPENGVVQMNSRDVRARARTIIKWQDLEVGQVVMLNYNPDNPKERGFWYDAEISRKRETRTARELYANVVLGDDSLNDCRIIFVDEVFKIERPGEGSPMVDNPMRRKSGPSCKHCKDDVNRLCRVCACHLCGGRQDPDKQLMCDECDMAFHIYCLDPPLSSVPSEDEWYCPECRNDASEVVLAGERLRESKKKAKMASATSSSQRDWGKGMACVGRTKECTIVPSNHYGPIPGIPVGTMWRFRVQVSESGVHRPHVAGIHGRSNDGAYSLVLAGGYEDDVDHGNFFTYTGSGGRDLSGNKRTAEQSCDQKLTNTNRALALNCFAPINDQEGAEAKDWRSGKPVRVVRNVKGGKNSKYAPAEGNRYDGIYKVVKYWPEKGKSGFLVWRYLLRRDDDEPGPWTKEGKDRIKKLGLTMQYPEGYLEALANREREKENSKREEEEQQEGGFASPRTGKGKWKRKSAGGGPSRAGSPRRTSKKTKVEPYSLTAQQSSLIREDKSNAKLWNEVLASLKDRPASGSPFQLFLSKVEETFQCICCQELVFRPITTVCQHNVCKDCLDRSFRAQVFSCPACRYDLGRSYAMQVNQPLQTVLNQLFPGYGNGR

SEQ ID NO: 1653 - DNA, 1338 bp, Homo sapien
atgaaggtgaagatgctgagccggaatccggacaattatgtccgcgaaaccaagttggacttacagagagttccaagaaactatgatcctgctttacatccttttgaggtcccacgagaatatgtaagagctttaaatgctaccaaactggaacgagtatttgcaaaaccattccttgcttcgctggatggtcaccgtgatggagtcaattgcttggcaaagcatccagagaagctggctactgtcctttctggggcgtgtgatggagaggttagaatttggaatctaactcagcggaattgtatccgtacaatacaagcacatgaaggctttgtacgaggaatatgtactcgcttttgtgggacttcttttttcactgttggtgatgacaaaactgtgaagcagtggaaaatggatgggccaggctatggagacgaggaagagccattacatacaatattaggaaagacagtgtatactgggattgatcatcactggaaagaagctgtttttgccacatgtggacagcaagtagacatttgggatgaacaaagaactaatcctatatgttcaatgacctggggatttgacagtataagtagtgttaaatttaacccaattgagacatttctcttgggaagttgtgcatctgacaggaatatagtactgtacgatatgaggcaagctactcctttgaaaaaggttatcttagatatgagaacaaatacaatctgttggaaccctatggaagctttcatttttacagcagcaaatgaagattataacttatatacttttgatatgcgtgcactggacactcctgtaatggtccatatggatcatgtatctgcagtgcttgatgtggattactctcccactgggaaggagtttgtgtctgctagtttcgataaatctattcgaatctttcctgtagacaaaagtcgaagcagggaggtatatcatacaaagagaatgcaacatgttatctgtgtaaaatggacttctgacagcaagtatattatgtgtggatctgatgaaatgaacattcgcctgtggaaagctaatgcttctgaaaaattgggtgtgcttacatcacgagaaaaagcagccaaggattataaccagaaattgaaggagaaatttcagcattatcctcatataaaacgtatagctcgtcatcgacatctaccaaaatctatctatagccagattcaggaacagcgcatcatgaaagaagctcgtcgacgaaaggaagtgaatcgtattaaacacagcaagcctggatctgtgccacttgtgtcagagaagaagaaacacgtagtggcagttgtaaaataa

SEQ ID NO: 1654 - protein, 445 aa, Homo sapien
MKVKMLSRNPDNYVRETKLDLQRVPRNYDPALHPFEVPREYVRALNATKLERVFAKPFLASLDGHRDGVNCLAKHPEKLATVLSGACDGEVRIWNLTQRNCIRTIQAHEGFVRGICTRFCGTSFFTVGDDKTVKQWKMDGPGYGDEEEPLHTILGKTVYTGIDHHWKEAVFATCGQQVDIWDEQRTNPICSMTWGFDSISSVKFNPIETFLLGSCASDRNIVLYDMRQATPLKKVILDMRTNTICWNPMEAFIFTAANEDYNLYTFDMRALDTPVMVHMDHVSAVLDVDYSPTGKEFVSASFDKSIRIFPVDKSRSREVYHTKRMQHVICVKWTSDSKYIMCGSDEMNIRLWKANASEKLGVLTSREKAAKDYNQKLKEKFQHYPHIKRIARHRHLPKSIYSQIQEQRIMKEARRRKEVNRIKHSKPGSVPLVSEKKKHVVAVVK

SEQ ID NO: 1655 - DNA, 1285 bp, Homo sapien
ggcacgagggtggcgtggagtggcgtggcgtggcggggtctcgcggcgcgggcgcgcacccggagctgtggacggagagtgcctccctctggcctcagtttcctcatgttgtagtagcggagcatggcccggaccgggcccccgagaccgccccgtgcaacctcaccgccagcctgggggcctcagcgactgggacgggaccaaggggctcggggattctccctgcccccggccctggtgcgtgactgaccctcctgttcccagagcccccagcgcaggccgggatgttcgtcctggtggaaatggtggacaccgtccggatccccccttggcagtttgagaggaagctcaacgactccattgccgaggagctgaacaagaagttggccaacaaggtcgtgtacaacgtgggactctgcatttgtctgtttgatatcaccaaactggaggatgcctatgtattccctggggatggcgcatcacacaccaaagtctctctaggcttcttcgatgacattctcatccccccagagtcactgcagcagccagccaagttcgacgaagcggagcaggtgtgggtgtgggagtacgagacggaggaaggagcacacgacctctacatggacaccggcgaggagatccgcttccgggtggtggacgagagctttgttgacacgtcccccacagggcccagctcagcagatgccaccacttccagtgaggagctgccaaagaaggaggctccgtacacgcttgtgggatccatcagtgagccaggcctgggccttctctcctggtggaccagcaactagccctggggctggacagtggaccctaccagcctgcgggaaggtggtatggccggctgtgaagacaacagcagctgaggccgatgctaaggagatagtgtctcgagctggacagtgaggcaaggccaggagtgcccaccagcttgccccgctcctccaccatctaggccctgctcctccttcactgcagtgatggatccatctgtggctgtggctgttgggcctccactgaccttgactgaaaagacccttcctggaccctggacttgacaacaaacggcacagacaccaatcactcacagaacagtcactggttttggattcttgttttccttgcaagaacaaaaggttctctagaatccttcagccaccaatgaaatgatcaggcaggagaaaaactttagatgggagtcttgtcatcaaaaataaatacagttgcatggaaaaaaaaaaaaaaaaaaaaaaaaaaaaaaaaa

SEQ ID NO: 1656 - protein, 175 aa, Homo sapien
MFVLVEMVDTVRIPPWQFERKLNDSIAEELNKKLANKVVYNVGLCICLFDITKLEDAYVFPGDGASHTKVSLGFFDDILIPPESLQQPAKFDEAEQVWVWEYETEEGAHDLYMDTGEEIRFRVVDESFVDTSPTGPSSADATTSSEELPKKEAPYTLVGSISEPGLGLLSWWTSN

SEQ ID NO: 1657 - DNA, 829 bp, Homo sapien
gcggcgcagcgcgcggcgcagcgcgcggcgtcagtcttggctggcagacctgtactccgtactccgtacttcgtagtcgcagcggcgcggtcttcggcagtctagtcatccaccgccatcctgggccccacgtgttgcctgaccattcctgagcccaggtgggagccgtggctgaggtgacggtctcaaagtggaagagcttactgtcacagcaactcctttgcaagatgccccggccaggaatagttgctgaacaccccaggcctgctgaggtccctccttgagtctcatgttcaagcagtctttgtccatgaaactgggaggcgaccgtgttagctgccagttcctgacagccacctctcaccagtggcttcactctgtgtccctgacccagcacatggcacaagagtgcctgccatccgtcagtgtttctacagcagcaatccctagatgctggagctagaggggacctgacctgagagaagataccttcagtggctgccaggctgttccttggaacctgtgcagggatgaggcctgcctgtgttaatacacctagtgaggagtggagctgaatttgaatgcaagccttggcaccttaattgagcaagtttgaaacctcgcttgttgcccttctggaaggagtcaggaatttccagttctgggcctgggctgtgggtctggcagacagacctctggccctaggtttgggtgccaggttctctgcttccagaatgagaagctttgctgtgcaccaggacctgggcccttttggtatctcctgaatgacacacaagggatatttaataaatatgcatttaaatatgtg

SEQ ID NO: 1658 - protein, 50 aa, Homo sapien
MKLGGDRVSCQFLTATSHQWLHSVSLTQHMAQECLPSVSVSTAAIPRCWS

SEQ ID NO: 1659 - DNA, 1835 bp, Homo sapien
cgctgtaattttcacaatattttaattctgttctgagatctacaaatatctctacataacaccaaagccagtgatttaataaataagaggaatgtatatatcgctttgcaaaaaaatgcctgatacatttatctctatataagatatttgtagaatcagtttcccaaggctcacgaaactaaagtgcacacacacacactttccaataccagtcggcattacccgccctttggtttcttttgctttggatttcagcccccatatcatttctggtaacagagcacagcaatagaatttctgggaagcagaccttgtgaatcgtgcctgtgtcttaattcacaaagggtaagtgaatgccgttgaaaggtgtttcatacacttaccccagaaatgagagcctgtctcatgcaggagtcgggaggcagcgatgtcagggaactgggactatgtctttatgactgtgatggtggtaaccaagtggggtggtcccctctggggagctgagtaagaacgcaaaggtttgggtcagtgattaggaagactataatatgactttgtgcatgcccgggagggctgccttgtagagaggatgtgagcagcttagtcgctcatctggccctgtgattcaggcttatggagcgttaagaataacagctgtcaaatggcctagacatggttaatgcaatttgttgctagtggaaatcctgaattgcttcctttctgtgatcactgctacttcttaagatgcttttgatgaatgtcatctgccttacaagttgacacctgataacttctccctgatgggtttccgaactggctgacttaaccaaaaagccagctcttgccatctatcttgcattaaaaggaattcctgaggctcctaaggggtcagctgccccactcctgacttttttatttttaatggtctataccttctgcaacatttttgtttatggccatttgaatagttggactttgactcctcacttgtgaataataggaatatattttgcagaatctaacataatacccttaaaattcatactggacaaccatcagtgtgatgtatagtatctggtgtaaacaaattttattcagcatattaaattattctgtgttttgcttttccttgatatgtaggaggtgcaccagtaccagtttttctcttgtggtggcttaaaacgctgattgccatttgcattgtctactgaaaagctgtggcagcgagtggtattattgaccatgtgttctcatgtctttttgcagatttaaaggttttattgtagtgtccatttaatatctgcatgtgtgtttaatctctgaataccatgtaattaaactgattaacttgtgatggtgatggtgattagcacacactaaaaacccaatgaagcaattgtctccctcttcttaactggaaatcacacttgtgaggtatggtatccattatcaacagtggattcatgattgacttcatattttgtgtatctggttataaattttgtatagcatttaatttggcacttaatataaatccatttgatttgaatagtgtgtgtgtgtacatggtgtgtgtgtgtgtgcactttagtttcgtgagccttgggaaactgattctacaaatatcttatatagagataaatgtatcaggcatttttttgcaaagcgatatatacattcctcttatttattaaatcactggctttggtgttatgtagagatatttgtagatctcagaacagaattaaaatattgtgaaaattacagcttaataaatgtttattgtaattttgttgtatggacttttaaaatatatctcatcacttctaaccaaa

SEQ ID NO: 1660 - protein, 19 aa, Homo sapien
MFIVILLYGLLKYISSLLT

SEQ ID NO: 1661 - DNA, 1230 bp, Homo sapien
gcgcgctgtcctggctcgggagatggacggccgccgtgttttgggccggttctggagtggctggcggcggggcctgggtgtccgcccagtgcccgaggacgcaggctttggcaccgaagcccggcatcagaggcaaccccgcggctcctgccaacggtcggggcccctcggggaccagcccttcgcggggctgctgccaaaaaacctcagtcgggaggagctggttgatgcgctgcgggcagccgtggtggaccggaaaggacctctagtgacgttgaacaagccacagggtctaccagtgacaggaaaaccaggagagctgacgttgttctcagtgctgccagagctgagccagtccctagggctcagggagcaggagcttcaggttgtccgagcatctgggaaagaaagctctgggcttgtactcctctccagctgtccccagacagctagtcgcctccagaagtacttcacccatgcacggagagcccaaaggcccacagccacctactgtgctgtcactgatgggatcccagctgcttctgaggggaagatccaggctgccctgaaactggaacacattgatggggtcaatctcacagttccagtgaaggccccatcccgaaaggacatcctggaaggtgtcaagaagactctcagtcactttcgtgtggtagccacaggctctggctgtgccctggtccagctgcagccactgacagtgttctccagtcaactacaggtgcacatggtactacagctctgccctgtgcttggggaccacatgtactctgcccgtgtgggcactgtcctgggccagcgatttctgctgccagctgagaacaacaagccccaaagacaggtcctggatgaagccctcctcagacgcctccacctgaccccctcccaggctgcccagctgcccttgcacctccacctacatcggctccttctcccaggcaccagggccagggacacccctgttgagctcctggcaccactgcccccttatttctccaggaccctacagtgcctggggctccgcttacaatagtcctccctctgttcctgaccccctcacacacactggaaagtgagggtgggggctctgcagtcagacaaacctaagatcacatcctggacaggccacttgcttgctgtgtggcattgggcaagtaactttacctctctggacttgtgataataaaagttcctacctcaaaaaaaaaa

SEQ ID NO: 1662 - protein, 350 aa, Homo sapien
RAVLAREMDGRRVLGRFWSGWRRGLGVRPVPEDAGFGTEARHQRQPRGSCQRSGPLGDQPFAGLLPKNLSREELVDALRAAVVDRKGPLVTLNKPQGLPVTGKPGELTLFSVLPELSQSLGLREQELQVVRASGKESSGLVLLSSCPQTASRLQKYFTHARRAQRPTATYCAVTDGIPAASEGKIQAALKLEHIDGVNLTVPVKAPSRKDILEGVKKTLSHFRVVATGSGCALVQLQPLTVFSSQLQVHMVLQLCPVLGDHMYSARVGTVLGQRFLLPAENNKPQRQVLDEALLRRLHLTPSQAAQLPLHLHLHRLLLPGTRARDTPVELLAPLPPYFSRTLQCLGLRLQ

SEQ ID NO: 1663 - DNA, 1844 bp, Homo sapien
ggcacgagggtggtgaggcctacagaagcggccttcagctggaccttggtctccccgccggacttcgagggtgtcatcgccgcccctgttgggggtgagcgccgcgcggctgcagcatgcctcacaggaagaaaaagccctttatagagaagaagaaagctgtgtcttttcacttggtccaccggagccaacgagatcctttagcagcagatgagagtgcaccccagagggttctattgcccacacaaaaaatagacaatgaagaaaggcgagcagaacagaggaagtatggagtgttctttgatgacgactatgactacctgcagcacctgaaggaaccatctgggccttcagagcttattccctcaagtaccttcagtgcacacaacaggagagaggagaaagaagaaacgctagtaattccaagcactggaattaagttgccttcatcagtgtttgcttcagagtttgaggaagatgttggattgttaaataaagcagctccagtttcaggacctcgactggattttgatcctgacattgttgcagctcttgatgatgattttgactttgatgatccagataatctgcttgaggatgactttattcttcaggccaataaggcaacaggagaggaagagggaatggatatacagaaatctgagaatgaagatgacagcgagtgggaagatgtggatgatgagaagggagatagcaatgatgactatgactctgcaggcctattgtcagatgaagactgtatgtctgtgcccggaaaaactcacagagctatagcagatcacttgttctggagtgaggaaacaaagagtcgcttcacggagtattcgatgacttcctcagtcatgaggagaaatgaacagctgaccctacatgatgagaggtttgagaagttttatgagcaatatgatgatgatgaaattggagctctggataatgcagaattggaaggttctattcaagtggacagcaatcgcttacaggaagttttgaatgactactataaagagaaggcagagaattgtgtaaaattgaatacccttgaacccttggaggatcaagacctgccaatgaatgagcttgatgagtctgaggaggaagaaatgattactgtagtccttgaagaagccaaagagaagtgggattgtgaatctatttgtagtacatactcaaatttatataaccatccacagcttatcaagtatcaaccaaagcccaaacaaattcgaatatcttctaaaacaggaatacctctcaatgtcttaccaaagaaaggactcacagcaaagcaaactgaaagaatacagatgattaatggcagtgatcttcctaaagtatcaactcagccacgttctaaaaatgaaagcaaagaagataaaagagcaagaaagcaagctataaaagaagagcgcaaggaacgaagagtggagaagaaagctaacaaattagcatttaaactggagaaaagaaggcaagaaaaagagctgctgaacttgaagaagaatgttgagggtctaaagctatagacagtggagcatacagggcaaggcactttattaggggctcctcatctttggttattgactagaaacttcagaaagacaaaactgtttgccatttttactggcagataagaggaaaatacaatatttgtattatttttatactagtaagtgtcccctgccaaccatcttgtaaatattgtaatactttaatttttaatattataagcttacatttgctctgaagtaaatgacttcatgaatgtgaaatgtttgataaattaaaggaaaatatcttcataaaaaaaaaaaaaaaaaaaaaaa

SEQ ID NO: 1664 - protein, 475 aa, Homo sapien
MPHRKKKPFIEKKKAVSFHLVHRSQRDPLAADESAPQRVLLPTQKIDNEERRAEQRKYGVFFDDDYDYLQHLKEPSGPSELIPSSTFSAHNRREEKEETLVIPSTGIKLPSSVFASEFEEDVGLLNKAAPVSGPRLDFDPDIVAALDDDFDFDDPDNLLEDDFILQANKATGEEEGMDIQKSENEDDSEWEDVDDEKGDSNDDYDSAGLLSDEDCMSVPGKTHRAIADHLFWSEETKSRFTEYSMTSSVMRRNEQLTLHDERFEKFYEQYDDDEIGALDNAELEGSIQVDSNRLQEVLNDYYKEKAENCVKLNTLEPLEDQDLPMNELDESEEEEMITVVLEEAKEKWDCESICSTYSNLYNHPQLIKYQPKPKQIRISSKTGIPLNVLPKKGLTAKQTERIQMINGSDLPKVSTQPRSKNESKEDKRARKQAIKEERKERRVEKKANKLAFKLEKRRQEKELLNLKKNVEGLKL

SEQ ID NO: 1665 - DNA, 808 bp, Homo sapien
tgctgctgactattgttggtgaaatattttcaccaactaaaggaaatagacatgaaaaacaatgacaatattcaatcacagcagtaagatggcctttgtgttgcaatcccttctaccccatcagacagctcctatctaacattcctctatacagttcatttctctacaagcattttctgattcttagataactccaatttttgctacctttatcttagacattaacactatagcccaaagcatagttactttgctaaatcagaaagcaactgagttctttgttttctcctcaaatagaatggggaacgtacacaacattctcttaagttctaacaggaataccattgtggtgatagaactcagggctgctaaggcaaatactctagacccatagttctttttagttagatgtattgaaacagacaaaaatattaacatcagaaaaagctcttgccaattagaggatcttcttaatcttcagcaattaagtttggggtttgagcggggcaggtcattgttacaacagaagtaaatttggcatctatagaaatcaattatgatttttgaaagatttatctaaatatatctatatagcatctctttaatgttagtcatttattagaaagatcctttatcctgatttgcttaaacctttcaataaattgcactttaaaggattataaataatccatttaaaaattcaagtacacacatcagtgttggttactatgcagagaatgtcattgtgtatagtttcatgtaatctgttatgtcagctgtattttttattaaaatcatgtcaagaaaa

SEQ ID NO: 1666 - protein, 26 aa, Homo sapien
MQRMSLCIVSCNLLCQLYFLLKSCQE

SEQ ID NO: 1667 - DNA, 1607 bp, Homo sapien
cacaataatttaaacagctttcttatttcttaacttctctgggtattttgtgtgctactgtatcttgtgaatgaatctcaagaggaaggatgaagcttttccaaaatcacatgccttcatctcattttacagaaaaatttgtgcctaatgttaaccaaaggaaatggggagcggcagggccagtgggttttcatggtgaactgagggttgcatcttggacaggttgcatgtggaagggacagcagggttcccaaggaagctttgcacggtcatgggtagagccatcccttcttcatccatagtgaatatggctggaaatagcgggtagtcttggatttgacctccctcccatggaagtgctgtctccagctcgctcctggaaaaactgctttctccccaaagtgtgtctgagcagcagatttaagcatgaagttggttttgtggggctacagtatggactttgggaagatggtgccatctgtatttctgattctaccgtccctctgtctgtctttggaagtatcctttcacttgtttgggagactgagaatgattttctgcaaacagtgagccagaccatgctggtctcaagcggcagagcagttattaacagaatcacagtctttctggagctgctgtcagtcctgtgctgtcctcagggcctttgcttggtcaggggccccacttcttatccacccttccctctacctcaccgaggctgctaggcccaggtgtattgtgattatttgatgtacctgggaggccatgtctcccggggaggctcaggacctcattgggctggaattccacagggatctctcattgggtctctttgggcctttggagaggggagtgcagggcaccacctgggcgaacacctgtgccatcctgtaagtccttgtgtgactcttcatccaagtcaacaggggcatgtaggggaagagcctcagggcccatcaggagtcagaccctgaccaggaagtcagaactgaatcaacttttcaataaacacacaggctggccccaaacaaagcagcaggcttttgggaacatctgccttttcagtctcttctgaattctgtttatgtggacaccccatgtcccgcaccaccattgccgccagcaatgtttgttgcttgccaatatttgaatagatgctgataaatttgattctctggcttattgtggcattcatgatatgtctttcccttttcagtttccatgtactagagcgactgtcagtgtggttggcagtgacctgtgtttttcatgcatgtttttgtttcagaataactgggagatgaaacaggaagctctatgacacacttgatcgaatatgacagacaccgaaaatcacgactcagccccctccagcacctctacctgttgcccgccgatcacagccggaatgcagctgaaagattccctggggcctggttccaaccgcccactgtggactctgaggcctctgcatttgcgggtggtctgcctgtgatattttggtcatgggctggtctggtcggtttcccatttgtctggccagtctctatgtgtcttaatcccttgtccttcattaaaagcaaaactaaagaaaaaaaaaaaaaaaa

SEQ ID NO: 1668 - protein, 52 aa, Homo sapien
MTDTENHDSAPSSTSTCCPPITAGMQLKDSLGPGSNRPLWTLRPLHLRVVCL

SEQ ID NO: 1669 - DNA, 2299 bp, Homo sapien
gttgttgcaataaaaagaattcatttactctgtttgggattctcgccatcaaggttcaaaatccctttatataactcccaagaggagaaatttattaagtgtgtgctttctggacagcttattctttactctgcatagaacatttaggttttaaaaacttaaatgtatactgacaattgatacataattatgaagtaaagttgaattcttcccttcccctcccccccagacaacttttaacatatttaatgaggggaaaaggtactggctgggagaagttaacactgagtttatcatctttacagaatgctaatgctgtcctcaactgattattttatatacatatatatgatacatgaaactctgggatcagatgcttttagaagccatcatgcaagccagtcattgatgtcactgctacacaacactgctaacttgactgtagctatgtaataacattagatcccctaattgtaattatattgggtttgcacagaacactttaatcttcccctcaccaatgtgaagtgaggaatcaggagtcaaactgtagaactaaaatttgacttcagtctagcgtttccttggtgtttttaggttgctttggtaagtttaggtttgctatatttctgattgcttagaattttgttttagccctttaaaatcagatcataaatatgaattcatacttctaaggaattttcttgctataagctggagtttaggtgatgtataggttcagttgagacatttttggaacaggcaaatccttagttaacataagatatttaacagttgaagatagtgtcatggatttttatcttttttagcaagtaatgctaagaaccactggcctgagctactactcttcagtatacattattaggattgcatagacttactagaggaacagtttcaggttttgatgctaatcagtgttgtgtcctaaagttgtcctttgtgcctttaaaaagttttggatatatcttctagtttaaaattgcttattaaggaattcattttataattgcagtgggaaagtaatggtcaagtaacactaggtagactatcatgcctgtttagcccagagaatttggggggagagagaatagataaaaatggcacccagaaaaatgttaaaatctttagtcaagactagaattaatacaattgtctacacttgtatggcagaaataaccttataaagtgtttaaggaattcagagaagggaatgtaccaaataagcaacagggagaaaattaggtaagaagtaagatacgaacgagaaacctgatttattgctcatccttcccttgcctccctaatggcaagcaaaactctgaacatctgaaaaggatgtagttctggacaaatcctgactacccagaggaaactcactgtgagattgctgttgatttgaagggtgctttcactaaggttatattttaaagtagaataacacatgctgagtgtaaactggctttggattggtcagctgcagtagtacaaaaacagcatagaatttgagaaaactaaaactgctatgagatagctatgagaaaactaaaactgctatgagatagaaatgatgtaaaattatgtggaaagttttccctcatatactcacatacagcctttgaagggctctggctctgaccggttgatggccttgagcgagatgaaatcatgaaattgagtcaaatcaatttgacattgaaatgacaagaggaaactcttaaatacataaaaacaagctctcatttgcctaggatagatactgtcttaaaaataaagactgaacctagatgttctgagcactagcaacaaggtattttaacaagtttaaaggaattctctgaaaaagttataaaattattctaggaaacataaccataatagtgttttaagggactttcacctggggattttatattcatgaacagagtgtattctgtatttaaaatgtctcatttgtgggaattggatgacatgttttttgataaatttattcacaatataaattgactttttattctaggaccatgtgaataatgggttccattgcacaaatacaaatattttaatagcttcttaggcagtggtgtagacatcttggatataaataattgtagatcttgtatatttgatttttaaaaaactagaataaacagagaggcataaacatatcttagagtccaagtggtagtgtttagcattggatataataaatggatgttttacaaagtgtttccataattctcttcctatacataaatgtcttgttttcaaaagtggatgg

SEQ ID NO: 1670 - protein, 45 aa, Homo sapien
VVAIKRIHLLCLGFSPSRFKIPLYNSQEEKFIKCVLSGQLILYSA

SEQ ID NO: 1671 - DNA, 2815 bp, Homo sapien
tggattttaaaagtattgaagaacaacaaaaacctctgacagattcccaaagggtaaagtttaccaaagaaattaaaggtctaaaggtggagataacgcactgtgggcagatgaagaggaagtaccgtgtctgcaatgtgacccggcggcccgccagtcaccaaacattcccgctgcagcaggagagcgggcagacggtggagtgcacggtggcccagtatttcaaggacaggcacaagttggttctgcgctacccccacctcccatgtttacaagtcggacaggagcagaaacacacctaccttcccctggaggtctgtaacattgtggcaggacaaagatgtattaaaaaattaacggacaatcagacctcaaccatgatcagagcaactgctaggtcggcgcccgatcggcaagaagagattagcaaattgatgcgaagtgcaagtttcaacacagatccatacgtccgtgaatttggaatcatggtcaaagatgagatgacagacgtgactgggcgggtgctgcagccgccctccatcctctacgggggcaggaataaagctattgcgacccctgtccagggcgtctgggacatgcggaacaagcagttccacacgggcatcgagatcaaggtgtgggccattgcgtgcttcgccccccagcgccagtgcacggaagtccatctgaagtccttcacagagcagctcagaaagatctcgagagacgctggcatgcccatccagggccagccgtgcttctgcaaatacgcgcagggggcggacagcgtggagcccatgttccggcacctgaagaacacgtatgcgggcctgcagctggtggtggtcatcctgcccggcaagacgcccgtgtacgccgaggtcaagcgcgtgggagacacggtgctggggatggccacgcagtgcgtgcagatgaagaacgtgcagaggaccacgccacagaccctgtccaacctctgcctgaagatcaacgtcaagctgggaggcgtgaacaacatcctgctgccccagggcaggccgccggtgttccagcagcccgtcatctttctgggagcagacgtcactcacccccccgccggggatgggaagaagccctccattgccgccgtggtgggcagcatggacgcccaccccaatcgctactgcgccaccgtgcgcgtgcagcagcaccggcaggagatcatacaagacctggccgccatggtccgcgagctcctcatccagttctacaagtccacgcgcttcaagcccacccgcatcatcttctaccgcgacggtgtctctgaaggccagttccagcaggttctccaccacgagttgctggccatccgtgaggcctgtatcaagctagaaaaagactaccagcccgggatcaccttcatcgtggtgcagaagaggcaccacacccggctcttctgcactgacaagaacgagcgggttgggaaaagtggaaacattccagcaggcacgactgtggacacgaaaatcacccaccccaccgagttcgacttctacctgtgtagtcacgctggcatccaggggacaagcaggccttcgcactatcacgtcctctgggacgacaatcgtttctcctctgatgagctgcagatcctaacctaccagctgtgtcacacctacgtgcgctgcacacgctccgtgtccatcccagcgccagcatactacgctcacctggtggccttccgggccaggtaccacctggtggataaggaacatgacagtgctgaaggaagccatacctctgggcagagtaacgggcgagaccaccaagcactggccaaggcggtccaggttcaccaagacactctgcgcaccatgtactttgcttgacatgttttagtgtttagcgattgtgtaccgagtgggattcacgagaccagctacactcagaccaacagatggccagcccttccgtgacagccagcatcgaacatgagacgtcattgattttattagattctccgttttccagaatgccttccgtcccagatttcaaacttggattttgaactgcagacctgtatgagaacccaatgtcataggaaatatggtttgctaaaatctataagctgcttattaaaacagagtcccgtgtgtcctaaaaatctcctaaaaccagtctatgaactcagggctttaaaacatttttaatttatttggtcattcaatttacttgtttttaatacatgattctctatgaaattgatgggctcaaactagctgtgaatcttctgagagtgaaagcaacacaaaacacaagtgtggttttaaagccttgaacattctgatgttgtcactaaagttgatttccaggcgatgctcgtgtgcccctggcgtggctcacccaagttcctcgactgagggccggtggccatgcagaggcgtccgcaggtgccgtgttctgccagcaccgcccttcacccggcctgaactaaggagcagtggcagaaggtgggccccgtgtgtttacagcatttccaggtccagagaggttggcagacaagtgccattttaataaaaaatgtatttaaaaaaagaaaaaagacaatatactgacagtctaatcatcagatttgtcctataggactgtgacatttattttccaaagtttttaaagaatacgggtctgtggtgataaatacagtacaatcctttttcactgttatgtctttaatgtaagagaagaatatatatatctggtttgcagtaaaaaaaaaaaaaaaaaaaaaaaaaaaaaaaaaaaaaaaaaaaaaaaaaaaaaaaaaaaaaaaaaaaaa

SEQ ID NO: 1672 - protein, 585 aa, Homo sapien
MKRKYRVCNVTRRPASHQTFPLQQESGQTVECTVAQYFKDRHKLVLRYPHLPCLQVGQEQKHTYLPLEVCNIVAGQRCIKKLTDNQTSTMIRATARSAPDRQEEISKLMRSASFNTDPYVREFGIMVKDEMTDVTGRVLQPPSILYGGRNKAIATPVQGVWDMRNKQFHTGIEIKVWAIACFAPQRQCTEVHLKSFTEQLRKISRDAGMPIQGQPCFCKYAQGADSVEPMFRHLKNTYAGLQLVVVILPGKTPVYAEVKRVGDTVLGMATQCVQMKNVQRTTPQTLSNLCLKINVKLGGVNNILLPQGRPPVFQQPVIFLGADVTHPPAGDGKKPSIAAVVGSMDAHPNRYCATVRVQQHRQEIIQDLAAMVRELLIQFYKSTRFKPTRIIFYRDGVSEGQFQQVLHHELLAIREACIKLEKDYQPGITFIVVQKRHHTRLFCTDKNERVGKSGNIPAGTTVDTKITHPTEFDFYLCSHAGIQGTSRPSHYHVLWDDNRFSSDELQILTYQLCHTYVRCTRSVSIPAPAYYAHLVAFRARYHLVDKEHDSAEGSHTSGQSNGRDHQALAKAVQVHQDTLRTMYFA

SEQ ID NO: 1673 - DNA, 2653 bp, Homo sapien
  Unsure 367-438: Unknown base
  Unsure 548-601: Unknown base
gggagttgcagggggagagatggaaaggctagcagctgaaaaaaaataggtaaataaccagtgtattccatgtagctgttaatctagtttgttgcttccatcagctgcaggagtattccatagtatgcatccaccatagtaaatttatccattcacctggttgcctcaaattcttggctacctggagaaattaaaacccttgaagctagggttctgagtacaagatcagttccaccaattagatttcttcatttgagatttgggaggtaaaggctgtctttctgctgtttgggttgttgctgctggaaagcaagtttatgtacatatggggctttctgcaacagctttccagctttgaaaacctgcnnnnnnnnnnnnnnnnnnnnnnnnnnnnnnnnnnnnnnnnnnnnnnnnnnnnnnnnnnnnnnnnnnnnnnnncattcaacaggtaaaataaatctactctgtaatagtataagtttgactacaataaactgtggttaagaagaaaaattggccgggcatggtggctcatgcctgcctgtaannnnnnnnnnnnnnnnnnnnnnnnnnnnnnnnnnnnnnnnnnnnnnnnnnnnnnccagagtaatggtttcttgactttctgtagcccttgttccttagtctgctgtgatatttatgttgacctttatcattttctattctgaacccctcttagcatttaatgtgaaatctaagaaattagaagtagaatggcttttattgttttgacacctttgaaattattattaataatttttccagagcaaaaaagcaaacacgctcaataagactaaacaaaacaaaatataaatgtacatcatttaatgtcccagtggctctattctacctgtaagaaaatgatacaaaaccacctaagatattttgaagcctgacaaatcagcttcatggaaaaaggtaaaaaatgcatttttcaaccgaaagggcagatccaatagaagacccgctccttaaataaacataaaatgtaaaaagttggaaaattaagagtaatgttccatctggaaactgaacttttgtccttgaacttgtgttggcaccaagcctcatacacagtgagctcaataactgttgggacaaaggaaggaaggacaaaatgtgtaacttcccagcatctgggagatgctgtctcttgcctcactgagtgttccttttctttgctctcatgtcattccctgagaacaatgaattctgggacaggctaaacatcatgatgaagtttcttaaacagactttcttagtggaaatccatttagatctgggtgtgctctatggggagtgctgacgtcaaagagcaaatgtctataaggggcccttttaaaatgaacattttcctcattgagcaagctgggattctctaatgtagaaatcaagccatctttataatttcacttcagatgtttatgtttttgtttttttttgtctccaatgatggtaaaaataaaaactacgcattacttaaaggagtttccctcacatgtaaacactgttaggaagtctggattaagttgaaagtcctgttttaactttttttctctcatataccaaacactctgtatttctcttaaagaagccctttaagagaaagccctaattttatatctgacagtaaagtttgctgcaagtgtatgagttcaaacacatcccttgttttctgtccctaggggaaaagtcatgtagttttagcttggctccagtgttaatattatattcagtagcagccttagaagagtggtctaagacttgaacctggagcaattttatagcacagaatcctacgaagataggactgtgaacatttgttttctttttcgtgtgtgtcaaactaactggtttttgctttaccaataaaatgtcctcggcagagtaaattttaaacgtgaaaattatagatcttgatattgaatccatcagtgattcaagagatacacctatttgcctaaaacaacctaagatgtattggttatggaatcatgtgttggataggttcttaagacctgtttcctcaaatcttgacacagttttcaagggtggcttattgacttgcacggttgggcagataatccagatttacctaagattgggtaaaaaagtcatctgtgactttgctggcagggcatttgctaagtggagtacaggatctaaaagggttttcttagaaagggcaatattgtccaatgaagtaagcagaaggactctgggttagaagcatctgcacaaaaactggtgagacctactctccactgctctgcagctggatggctgatggcaggctgagcagtggggaagcaggttttaacaacagggagtccttccaggtcactgtatattgagaagaaacataaaactattgtctgttacattccgaggtcagccttcttcttaacgttttataatatgcaaatgccagcttctggaaagcaagtatcatcatgtaccaaatgctttatacaccatcacattcatgaattttttagcatggtcagaacttgtgtaaatatgtctcttagatgattttggggagatgtgatttatttttcatattttcaaaatgcatttcatttcaaataaagttatctattgagacaaccgaaaaaaaaaaaaaaagcgg

SEQ ID NO: 1674 - protein, 33 aa, Homo sapien
MILGRCDLFFIFSKCISFQIKLSIETTEKKKKS

SEQ ID NO: 1675 - DNA, 717 bp, Homo sapien
gcacgagggctacggccctggaacggggccatggagaagctgcggcgagtcctgagcggccaggacgacgaggagcagggcctgactgcgcaggtcctggatgcctcatcccttagtttcaacaccagattgaaatggtttgccatctgcttcgtatgtggcgttttcttttctattcttggaactggattgctgtggcttccgggcggcataaagctttttgcagtgttttataccctcggcaatcttgctgcgttagccagtacatgctttttaatgggacctgtgaagcaactgaagaaaatgtttgaagcaacaagattgcttgcaacaattgttatgcttttgtgtttcatatttaccctgtgtgctgctctttggtggcataagaagggactggctgtgttattctgcatattgcagttcttgtcaatgacctggtatagcctgtcatacatcccatatgcaagggatgcagttattaaatgctgttcttctctcctaagttgaaaatcagaaacttgtggaaaagagcacttgaatgttggtactctatgtttggtgaagtttgcttttccccataaaacactccaggaacaactgacgtgacagttgaagaccgttttgtactaagtctcattttgtatactggtaaaaactacatgcttgattaaaccattaaatgcttgtaactttaaaaaaaaaaaaaaaaaaaaa

SEQ ID NO: 1676 - protein, 159 aa, Homo sapien
MEKLRRVLSGQDDEEQGLTAQVLDASSLSFNTRLKWFAICFVCGVFFSILGTGLLWLPGGIKLFAVFYTLGNLAALASTCFLMGPVKQLKKMFEATRLLATIVMLLCFIFTLCAALWWHKKGLAVLFCILQFLSMTWYSLSYIPYARDAVIKCCSSLLS

SEQ ID NO: 1677 - DNA, 826 bp, Homo sapien
ttccggccttgtaatcgccgagggcacgtgcatgccccctggttaagagttgcaggtagcggtagcgatggacactctggatcgagtagtaaagcccaaaacgaaaagagccaagagattccttgagaagagagaaccgaaactcaatgaaaatattaaaaatgccatgctgattaaagggggaaatgcaaatgcaacagtgacaaaagtacttaaagatgtgtatgcactgaaaaaaccatacggtgtactatataaaaagaaaaatattacaagaccttttgaggatcagacatcactggaattcttttcaaagaagtcagattgttctttattcatgtttggctcccataataagaagcggccaaataatctagtaataggtcgtatgtatgactaccatgtgctggatatgattgaattaggtattgagaattttgtctctctaaaagacattaagaacagtaaatgtcctgagggaacaaaacccatgctgatatttgctggcgatgatttcgatgtaacagaagattatagaagactaaaaagtcttcttattgatttcttcagaggccccacagtatcaaatatccgcctggctggattagagtatgttctgcacttcactgcactgaatgggaagatttactttcgaagctataagttgctgttgaagaaatctggttgcagaacaccacggattgaattggaagagatgggaccctcattggatctggttctgaggaggacacacctggcatcggatgacctttataaattatctatgaaaatgccaaaagctctcaagccaaaaaaaaaaaaaaaa

SEQ ID NO: 1678 - protein, 253 aa, Homo sapien
MDTLDRVVKPKTKRAKRFLEKREPKLNENIKNAMLIKGGNANATVTKVLKDVYALKKPYGVLYKKKNITRPFEDQTSLEFFSKKSDCSLFMFGSHNKKRPNNLVIGRMYDYHVLDMIELGIENFVSLKDIKNSKCPEGTKPMLIFAGDDFDVTEDYRRLKSLLIDFFRGPTVSNIRLAGLEYVLHFTALNGKIYFRSYKLLLKKSGCRTPRIELEEMGPSLDLVLRRTHLASDDLYKLSMKMPKALKPKKKKK

SEQ ID NO: 1679 - DNA, 4839 bp, Homo sapien
tgagtttcagtttatgtacttaaatatgactgtcaattttccaatcattttttttttctaaaacaactacaaaatttgttcagcccaatgtgacaccccttggccttcacatagtgcaaatgaattatgtatgtgttgtttacctccattttcttcctattgtcccttcccatctatgagtagcatagtgtattcgttgaccgtgtcagcttgcttatgtcaaaagaatcttaattatacataaattgtaaaatgtgttagtccatgaaaatatttctcagttggttatcactgcaacaggaacattctctacaactgaaacagaatttgatgtgagtacagtatcagatgatagttgtgtttatgacattagctacctaagtcatgatatcccttgacaccaagattatcacaggtggggatagccattgaatacattcagaggggagcccacatcatcccccaaaatgcttattatttgtagagtttatcagaataaaaatagcaaactctagaaatagtgttgggaatagtccttgagtgggtttgggaactgtagtttgaggtaattatgatatatccagcccagcagacgctcattaactatgcaggtgctgtgttctgtgctaggtactaagactataaagatgaattagacacagctttgcccctaaaggagttgccaggtaagggttaggggttaatgtagtgtagagcggtcagtatgagcaaatgtatgggggtggggcggggcaactgtacagatgaacaatctggaatattaaattcaactcacagagtggcaacaaacaatactggagagctgggcatgaatcctggaaagccttgtatggccctgcaagggaagccatgttctgaaagctcctatgagggggactgactgactctagataagtagattgaaagaattagaggtaaagtcagtgcagcagcactaatcacaattaaaataaatgctttaatttttaaaaagcggaaaaacatgaaaggacacttcgcaagcttctcaaaacttcctgtgatttggagggctattttgagcagagtctagacgaaaactggatctgactggctccagagtaaagatctgagaaatggaacccagcaatttagatattacaagagcctgttatacttgtcattttttatttggtatttgttaaatattacaaaaatggttatgctttttaattcaaaatttgacgtttcagcatgatgatacattcttgccttttttcccccttccatatagcattttccaccccagcaagtcaactcttttctcctcatggttctaatccttcaacacctgctgcaactcctgttcctactgcatccccagtcaaggcaattaatcatccatcagcatcagcagctgccaccgtttctggaatgaacctgctgaatactgtccttcctgtgttcccagggcaggtctcctcagccgttcacacacctcagccatcaataccaaacccaacagttatcagaaccccttcattgcccactgcacctgttacatccatccacagtacaaccaccactcctgttccttccattttttctggcctagtgtcactgccaggtccttctgccactcctaccgcagccactcctaccccaggacctacaccacggtccactcttggttccagtgaagcatttgcttctacttctgcacctttcactagcctccccttttccaccagctcttctgctgcttctaccagcaacccaaattctgcttcattgtcatcagtttttgcagggctccctttgcccttaccaccaacatcccaaggcctatccaacccgactcctgtaattgctggtggctctactcccagcgttgccggtccacttggtgtgaacagtccatcttttgtctgcgttaaaaggttttctgacatccaatgacaccaatttaatcaactcctctgctttatcctctgctgtcacaagtgggctggcttcactatcttctcttactcttcagaactctgactcttctgcttcagcccctaacaagtgctatgccccatcagccatccctaccccacagaggacttccactccagggttggccctgttcccaggcctgccgtctcccgtggctaactcaacttccactcccctgacattgcctgtacagtctcctttagccactgctgcatcagcttccacgtcagtgccagttagctgtggctcctcagcctcccttttgcgtggcccccacccaggtacctcagatctgcatatttcatctacccctgctgcaacaactcttcctgttatgatcaaaactgagcccacaagtcctactccctcggccttcaaaggtccatctcattctgggaatccctctcatggcactttaggtttgtcagggacattgggccgtgcatatacttcaacatccgtgcccatcagtttatctgcttgccttaatcctgcattgtcaggtctctccagcttgagtactcctttaaatggttcaaatcctctttcctctatttcccttccaccacatggttcctccactcccattgcaccagtattcactgctcttccttcttttacttctttgaccaacaattttcctttaactggcaacccatctcttaatccgtcagtatctctcccagggtcattaatagccacctcatctaccgctgccacctccacatctctccctcatcctagctcaacggcagctgttctctcagggctttctgcttcagcaccagtctcagcagcacctttccccctcaacctgtccactgctgttccctcacttttctctgttactcaaggacctctgtcatcttcaaatccctcctatccaggcttttctgtctctaataccccaagcgttacccctgctcttccctcattcccggggctgcaggcgccctctacagtcgcagctgtcacaccactacctgtggctgccacagccccatccccagctccagtcctcccaggattcgcctcagcattcagttccaatttcaactccgctcttgttgcacaagccggtttatcatctggacttcaagctgcaggcagttctgtttttccaggccttttgtccctcccgggtatccctgggtttcctcagaatccttcacaatcatccttgcaagaattacagcataatgcggctgcgcagtcagcattgttacagcaggtccattcagcttcggctctggaaagctatccagctcagcctgatgggtttcctagttatccttcagcgccaggaacaccattttctttgcaaccaagcctgtcccagagtgggtggcagtgaatacttttaacttttattctccttcagagcaacatcagaattgcctgagaactgcaatgaacaatctgacaaatgtgaagctggccaaaagtcggaaaatgagaatgagggtaatcctggagaaattgtgacaacaatttgaaaattgtggttgcattttaaagtgtgaacactcccctatgtaaatatgctgacaataaattgtatggagaatggtatttaaaaagtgtttggagacttttcacctgtcctataaaattttgaattgtgtatgtgatctacatagaaagaatattaaagagtaggttgaactctttatagccgaatacagccttaaatatgcttgtatagcatccactggcagaagtaatagttgtgcctcagacttgggggttgcatgtggccctgggggagttactacccttggtatgcatgagcggttcctattagcatcagtgggaactcagtactctgtatgtatccacaaaagggaacttgagacccacagttattcttaatttctgatattaacaaccgtacatactgctgaatttaactcaaaatatttcaggtaagtgaaagtggtgcttaatgtagactatagaatgactttcaggtgttttcaactgaaagtatatatccagaactgcatccttatagaaatacaagtaagacttaggataatttgccttcaaaacagttttcctaatctcagcagtatccagtgagtgaagaacacttgactgactcttgggccacctctgttacttactgtactatggaagctcctggtgaatgtttacaattatgggatgtagtatttctatttgtactttaagtcaaatgcttatatgaaatatgtgacaacaaatagagaagactggctctgttagtaattatgcagtatgtactctatttaaggatctgtggtagtataacatgagtgaatgtcattaattttgaagtaataactgccacatgtgggaagtaggggagtaaggagaatgaattccaatctgtgattaaaagtgtaaactatagactctactgtagtacatttcaggatctagaagttttacttttataaagatggtgtccggaagatgttgctaatgtattttacttcaacatagggaacaaactttttaagtatattaataaacctgtatggttagtttttaacagttttttaaaataaactatggatatgacaaatattctgtgttttactaagtgcttggataggctttctaattttgtatacgtgctagagttaattattgaacatttttatccaaatttagttgtaactctgtttatactactgattgctcattcgtttaaatgatattttaatgtaaaagtcataaccaacatatgaacagacagatttatgtctttaaacacagaatgtaagctatagtttaatctgataccagttgctggaagttgccatttgtttttcttaaatctatacccataaaacttcttttaagattaaaaaa

SEQ ID NO: 1680 - protein, 698 aa, Homo sapien
MIHSCLFSPFHIAFSTPASQLFSPHGSNPSTPAATPVPTASPVKAINHPSASAAATVSGMNLLNTVLPVFPGQVSSAVHTPQPSIPNPTVIRTPSLPTAPVTSIHSTTTTPVPSIFSGLVSLPGPSATPTAATPTPGPTPRSTLGSSEAFASTSAPFTSLPFSTSSSAASTSNPNSASLSSVFAGLPLPLPPTSQGLSNPTPVIAGGSTPSVAGPLGVNSPSFVCVKRFSDIQDTNLINSSALSSAVTSGLASLSSLTLQNSDSSASAPNKCYAPSAIPTPQRTSTPGLALFPGLPSPVANSTSTPLTLPVQSPLATAASASTSVPVSCGSSASLLRGPHPGTSDLHISSTPAATTLPVMIKTEPTSPTPSAFKGPSHSGNPSHGTLGLSGTLGRAYTSTSVPISLSACLNPALSGLSSLSTPLNGSNPLSSISLPPHGSSTPIAPVFTALPSFTSLTNNFPLTGNPSLNPSVSLPGSLIATSSTAATSTSLPHPSSTAAVLSGLSASAPVSAAPFPLNLSTAVPSLFSVTQGPLSSSNPSYPGFSVSNTPSVTPALPSFPGLQAPSTVAAVTPLPVAATAPSPAPVLPGFASAFSSNFNSALVAQAGLSSGLQAAGSSVFPGLLSLPGIPGFPQNPSQSSLQELQHNAAAQSALLQQVHSASALESYPAQPDGFPSYPSAPGTPFSLQPSLSQSGWQ

SEQ ID NO: 1681 - DNA, 1348 bp, Homo sapien
aacctacctcagtttcagagaatgaaggcatttcaaccataccaagccctgtgacctcaccagttttgtcccgccgacactatggagaatctataacaaatataggcaaagcaagcatattaggggctgctagcattggaaagggacttggaggaatgttgttctcaagatttggacgttcatctacaacacagtcatctgaaacatcaaaagactcaatggaagatgagaagaagccagttgcctcaccttctgctaccaccgtagggacacagacccttccacatagcagttctggcttcctcgattctgcatatttcagacttcaagaatcgttctttaatctcccacaacttctttttccggaaaatgtaatgcagaataaagataatgccctcgtggagttggatcacaggattgattttgaactcagagaaggccttgtggagagccgctattggtcagctgtcacgtcgcatactgcctattggtcatccttggatgttgccctttttcttttaaccttcatgtataaacatgagcacgatgatgatgcaaaacccaatttagatccaatctgaactcttgaaggacatgaatggcctaaaactgattttttttttttccgttaaaatgtgtgtgtcaagatacggagatttcagggttaaagtatatttcagttttctttagggcaacatatatttgaatttaaaagcactttatttaaaaaaaaaagaagttttcagttctgaagaagtcatttacagtttgcatcattttaattatgagtctgacaaaaccttctccagagaatcaagcaagacctggatgtgaagaaggtttgggtaaactgcatgtaaaggctacaaatcacaatctgattcctcccaaatataaaggcatatggaacataatgtattaaccaaagtatgttataaatcaaaaatggtcaaggttcagcatattctatatgaagatcacaaggtggtatcgttttagatttctatgaaggctttcatttgtacatccctttgaaaaaatataacagatttaaaatgttttgaatttaacttgtttagaaaaactaatgcttaaaacaatatttgaactactgtatttataatttattacctctaattgctttatttcagtgtatgagacattactgttttaatgtttgctttgaacataatttaagaaccagatttattttctatagtgataaacccttttttctcagaactccatctttgtactcttcagatgaatatatagacactgtggcatacattttttttcattaaaaacttatggcttcaaaaaaaaaaaaaaaaaaaaaaaaaaaaaa

SEQ ID NO: 1682 - DNA, 4412 bp, Homo sapien
ctggcttcaaagctcagcgaccacactgctaattaagaatgcttatgaagaatgtttaatgatatgaggaagacttacaaactgtttttacaaagttatcaatgtgtggattttatttacatgaaagaaaaaatagtcacaaatgttacctttcaatggtagtataatagaatattaaaatttacttttatttcattctaaattttctacattctgcatgtattctctttataatcattttgtaaactcagaatactgttgtaaagatgtcagctccttcccgaggaaataccactagttagacttaatacacacatttttttatgttgaattgaaattttacttggtaatgaatcattccctttaatctactcttctagattactgatctctcattacccaactatctgatggcatcttcggttggactgcttcctacccagcttctgaattcttacttgggtaccaccctgcggacaatggaagatgtcattgcagaacagagtgttagtggatattttgttttttgtttacagattattataagtataggcctcatgttttatgtagttcatcgagctcaagtggaattgaatgcagctattgtagcttgtgaaatggaactgaaatcttctctggttaaaggcaatcaaccaaataccagtggctcttcattctacaacaagaggaccctaacattttctggaggtggaatcaatgttgtatgattctaatgagatacgtgattgtcaagagcctagtgtgctatctaaggtctagcagtcacttcactagtgggcagagacaagttctaattgtattacagcacaaacaaaactgactagtttttaaattgcaccattgtttttttttttaaagcaagaatcattttctgggtatgtaagtgtaaatgtagatgcaaatttggctgcacctctttatcatgcctgtattggcctataggtctgcactttagtgttttttaattgttttatttctgtgtatttacgaacagagaaataacccaaatattatttctgcttagtgtctttatttataaagcccatgagtagtttgtatgcatctttcctacttgtaaagatgagtaaaagtatgcagttttaaatttataatattattggatgttctttgctttggtagtctttccagaaaggataaacagtggtttttgttttgttttgttttattgtttaagtgggaccacttagcttcccgtttccttactagttaaagaacagacattaattttcagttgaatgtatttttgcaggcatcatattgttacagggccatttacacctattcacaaagcttaaatcctaccttgtgggactgaagtgctcttaatataactgtttattttcactgtgtaatatgcaaagcaaaagggaaattatttggtggatggtagctcaaaattggaactcttgttctaattcagttacattggctttaccctccttagatttttcatcaaagggctgtcccattgcaatcttactaaaacattttgttaaaataaactcttttcctttttatattaataattaggcttttaaataaagatgttattcctttaaaatggtgggcttaccatcattgaagatgtcactcaggtggccttgtttgatcaaaacgccttttttaaaaaccaagctttaaaaacatgtttataatttcatgaagtacatatatattgttcccatagtcttcagctttaaaactataaatatgcccaaattttgttatttgccctactttaagtaggtttattgtgtttgttttttcagtacttgtttttctctgataagactcaggaattctgaaatgtgaaattgtctcaattctttctcttgtagcatgaatcaaatgtatttattaatagcacttatgactatagaatataatttggcatatgattcatattacatatgtattcattttatttttaaaatagtttataaacttaatgatttttttttacaaatgaggttatagatattaatgcaaattttctggtaggtatctctttttttgctatgatgattccaacttatcagagacctcccatttgccttttcattacggtgaaagctttgccctcatctactaaagtacaaaggaattctttggaagcagattattctagtcttatgctagagatgaatttgatcattttaatgtgtgatctttttgctctatcaggtataattgttttcctttcctttataatgggtaagttttctcacctttgagtaacagtaaagttcatttatatgtccatacctagaagaccagtgcaaatactttgagagcacctgggtctacaggacataattggcatctaaatcctcatttcttgctattagtaggaaaacagatatagtattgtaatacccttattctttttgaatcctaattactcatttcggttttttttctctcttttgaatctagttgctggttttcgtttaatgattttagtttaacaatcccaaccaacaatacatttgatttatttttttctgtctaacctgacaacctttttcttgtgcttcttgtttgttggttagtttttgtgaaaggaatcattgtttaagatcactgttttcatacttgttttacacttcacgtattttgaagtacatttatttactaagcatttgtgacttgaataatttcaccaaatgaatacattttggtagtttgtaatgagttcttctaattgttacactttgcttggtacttaacaataaatatgtaaaggtaaaagaaataattttctgtattctgccaatcttaattttatataataaatcatccatttttttcttaaaatagtatggattgactgtttctaaaataccaatctgtggctgtggtttttcttttcttcagcatttccagcatccaagtaaacaatagtcccttatagtcctgctacttgatgggtaaatttggttgctgggtttttaagttgcactcacaataaatcgtgcaaagcattgtcatgccttatttactccatttttaatcctgcatcccagatttatggcagcaacacatatctacaggatacttttatgttgtccaaatattgctgtcagtcatatgtacttataaaatgtctccagtcatgtatatttatagaaatgaaatgtcaaatttctcagactgttaaagtgcagtataaagttgcttaatgcacacttaaaaatgatatataatttctgaatcctatgaaatatgtgttcttttttaattctttgggagttttcttaagttttacatgttttttggtttattgttaatgattttgtttactctttgccaaattttgtcatgtaggttattttacaatagcacctttaaaaaaaatgtatatgctaatttactaagcatattcatgtccatttttatttgatcatctgatttgtgaaataacttgaaatttgtactgtttggtttgtgaaaataatattaccaaatctctgtcattagaatgtgtactttatgttcagaagtgactgtgggtttattcagagccagccattctctcccttgatgcactttgtaaccagctacacatgcttttaggtggcttttccctgatagggtcaagtatatgactataaaacatttttcttgtgaagctattaagttcattagttactcttatttccccttgttgtaactaagtggtgcaggtataagcatatccccagcattcctgtgtgtgtgaatgtgcactgctgatttggactgttcttgagaaaggtgctgtgacatatgtcaatatttgttagctctggggatatctttagaatgcttgagaaagttgctaggtgtgtgccacattggtgcaggtaaatccatgctgttcacagccaagcagcatttgcagagaaaaggagagttttacatagaccccaggaaaaacagtactaacctggttgatggccttggtggtggaattttgtttcagccagaggctactcattatatcagaatgatgttcagtataacactatctgatttttagattggtcgatttctgttgtaatcaagtatttaggatgtaatctttttaaagtcattgctttaatctgaaaagccattagaagggagaggaatcactgttccacaggatatttaaaactcaggagttcaaataacctcacatattgaacataaactgttaacttattccacaactaaattctaacctgatacttatgaattgcaaagtgattgctgcaaactttttctaaggtggctgaagatttaaaatagatcattctaaagggaaatcagtaaaatgtcttgataattggtatccaaatcacttgtgtgcctgagaaaataaaaggtaatattttactttcaaaaaa

SEQ ID NO: 1683 - protein, 105 aa, Homo sapien [sequence omitted]

SEQ ID NO: 1684 - DNA, 4196 bp, Homo sapien
caatgctacatatgtacagcctagaagaaaacagagagatgagcagcttctgacaaatgtcctggaaacacttcgaggtgatggaaatgtgttaatagcagtggacacagcaggcagagttttggaacttgctcaacttcttgatcagatttggaggactaaagatgcaggattgggtgtttactcattggcactcctaaataatgtcagttacaatgtggtggagttttctaagtcccaggtagaatggatgagtgataaattgatgagatgttttgaagacaaaagaaataatccgtttcagtttcgccatctctctttatgtcatggtctttctgacttggcccgtgtacctagccctaaagttgtacttgccagccaacctgacctggaatgcggattttcaagggatctctttattcagtggtgtcaggaccctaaaaactcaatcattctaacctacagaactactcctgggactttagcacgtttcctaattgataatccttctgaaaaaattacagaaatagagttgaggaaacgtgtgaagcttgaagggaaagaacttgaagaatacttggaaaaagagaaactaaagaaagaagctgccaaaaagcttgagcagtcaaaagaggcagatatagattccagtgatgagagtgatattgaggaagatattgaccagccatcagctcataagacgaagcatgacttgatgatgaaaggtgaaggcagtcgtaaaggaagttttttcaaacaggcaaaaaagtcctatcctatgtttcctgccccagaagaaagaattaaatgggatgaatatggagagattatcaaaccagaggatttcttagtgccagagcttcaagctactgaagaagaaaaaagcaaattagaatctggtttgacaaatggagatgaacctatggatcaggatttatctgatgttcctactaaatgtatttctacaacagagtctattgaaataaaagcccgggttacctacatagactatgaaggacgctctgatggggattccattaaaaaaatcattaatcagatgaaaccacgacagttgatcatcgtccatggcccaccagaggccagtcaagatctggcagagtgctgtcgcgcctttggtgggaaagatattaaagtgtacatgccaaagctacatgaaacagttgatgccactagtgaaactcacatctaccaggtgaggttaaaagactcacttgtcagctctcttcagttttgtaaggcaaaagatgctgaattagcttggatagatggtgtcttagatatgagagtttccaaagtggacacaggggttattttagaagaaggagaactaaaggatgatggagaagactcagagatgcaagtggaagctccctcagattctagcgttatagcacaacaaaaggccatgaaaagtctgttcggagatgatgaaaaagaaacaggtgaagaaagtgagatcattcctactttggaacccttgccacctcatgaggttcctggacatcagtcagtttttatgaatgaaccaaggctgtcagacttcaagcaagttctcttacgggaggggattcaagctgaatttgtaggaggtgtacttgtttgcaacaatcaagtagcagtccgcagaacggaaactggacgcattggattagaaggctgcctttgtcaagatttttataggataagagaccttttatatgaacaatatgccattgtataaaggacatgatgtcaagaagtatctgcttgacctttctaagaaaaagggattcttatcttactctgagcttttgatgttttgttttgtaacatacaaaaagaatctgccagaaaaacttacatgtatcagatttttaaaaatataaatagagaacattttgcaaatgctcaaatgagcattctatcttttggctttcagagtgatagagctcctaacaggtgtacaggcccaagagttgaaggtgattggttttctttacagactccttgttctctagaagggctttttacttgaataaaacaatgcaacttagcaaaccaatttatggccttagagaaacatttttgcatgagttcttacaaactgtttgttatattttctggaatgataagtgagaattatttagaaaagacatgctccaaaaaaaaaacaaaactgataaaacagtttttcgaaacttacttttaaaagcatacgtgctatgactctctccagtttgaatatgcaattgttttcacaggcaggatgtctgttttctgcctgtatttcccagtgatttactctagggtaaggtagtacacatttggttcagaaattaatttttatttctcctatatcttgttttatcaagattttgttgtggcatttcaatgtaaattataacaccatcatttgagtatacataattcaaaagaactacttgatgcagtatagtcttaagggttctgcatacattttagaaacatcttagccgtaagttaggtcctgtgttaaactgtttagtgctctgtttttaagaaaacaaatgttgaacctcacacttttatgtggtgacagtgtaatttaattaaaaggtgtaaatgttttcatctcttaggcttgctgtctcctaaggtcacccaagcagtggttggattttatacacattactactaaaataatactgaagttggataaggttatcctttctgtatttgcgtctttcttgtgactaaccaccctgatatagtattaaccactgtgttcaagagtaaaaacaatatatgcaattttcattgaacttaaagagtgaaaaccatgtaaactattgaaactattgtaatccattaatgcttttttagaatggcagaccttgatgtttatttctcaaatggttaagccctcttctttactcttaatttttttttgagacagagtcacccaggctggagtgcagtggtgagattttggctcactataacctcttcctccagggttcaagtgattctcccacctcagcctcccaagtagctgggactacgggcacatgccactgcacctggctaatttttatatttttggtagagacagggtttcaccatgttggccaggctggtctcaaactcctgacctcaagcgatccacccacctaggcctcccaaagtgctgggattacaggcatgaatcaccacaactagcctacccttagatttttggaaggatcgatcttatttaactatgtgtggaacaacccagtaatatcagactcgaattactatttcattctatttcaaatgcttataaagctactattgtagattatagtgttaatgcaaagtttacagacttttgatatggaaaaccagataaaacaatgttacaaaaggcaaatataaagagtatgttttctttttagtgctttggaaaaatttcacttaaactcttattactgtatagattaagccctataatgctatttatattccaggggaacgaaaatctgaatttgttttatgatttaaagcatctggtttgcatattgtattgtaatactgatacagtttggctgtgtccccaccaaattgaattgtgttaatagttcccataatccctacgtgttgtgggagggacccagtgggcagtaatttaatcatggtggtggttaccctcatgctgttcttgtgatggtgagttctcatgagatctgatgggtgtttttttttgttttgttttttgttttttgagatggagttttgctcttgttgcccagactggagtgcaatggcacacgatctcggctcaccgcaacctctgcctcctgggttcaagcgattctcctgcctcagcatctcgagtagctgggattacaggcatgcaccaccacgcccagctaattttgtatttttagtagagacggggtttctccatgttggttaggctggcctcaaactcccgacctcaggtgatccgcccgcctgggcctcccaaagtgctgggattacaggcgtgagccactgctcctggcccaagatctgatggttttgtaagggaattttccccctttgcttggcacttcttcctgctgccatgtgaagaaggatgtgtttgcttccccttccaccatgattgtaagtttcatgaggcctccccagcctgtgggactgtgagtcaattaaacgtgtttactttataaatt

SEQ ID NO: 1685 - protein, 579 aa, Homo sapien
NATYVQPRRKQRDEQLLTNVLETLRGDGNVLIAVDTAGRVLELAQLLDQIWRTKDAGLGVYSLALLNNVSYNVVEFSKSQVEWMSDKLMRCFEDKRNNPFQFRHLSLCHGLSDLARVPSPKVVLASQPDLECGFSRDLFIQWCQDPKNSIILTYRTTPGTLARFLIDNPSEKITEIELRKRVKLEGKELEEYLEKEKLKKEAAKKLEQSKEADIDSSDESDIEEDIDQPSAHKTKHDLMMKGEGSRKGSFFKQAKKSYPMFPAPEERIKWDEYGEIIKPEDFLVPELQATEEEKSKLESGLTNGDEPMDQDLSDVPTKCISTTESIEIKARVTYIDYEGRSDGDSIKKIINQMKPRQLIIVHGPPEASQDLAECCRAFGGKDIKVYMPKLHETVDATSETHIYQVRLKDSLVSSLQFCKAKDAELAWIDGVLDMRVSKVDTGVILEEGELKDDGEDSEMQVEAPSDSSVIAQQKAMKSLFGDDEKETGEESEIIPTLEPLPPHEVPGHQSVFMNEPRLSDFKQVLLREGIQAEFVGGVLVCNNQVAVRRTETGRIGLEGCLCQDFYRIRDLLYEQYAIV

SEQ ID NO: 1686 - DNA, 3941 bp, Homo sapien
gcaggatgtgatggaaatgaaaaaaacaaaggttcgcctaatgaaacaaatgaaagaagaacaagagaaagccagactgactgagtctagaagaaacagagagattgctcagttgaaaaaggatcaacgtaaaagagatcatcaacttagacttctggaagcccaaaaaagaaaccaagaagtggttctacgtcgcaaaactgaagaggttacggctcttcgtcggcaagtaagacccatgtcagataaagtggctgggaaagttactcggaagctgagttcatctgatgcacctgctcaggacacaggttccagtgcagctgctgtcgaaacagatgcatcaaggacaggagcccagcagaaaatgagaattcctgtggcgagagtccaggccttaccaacgccggcaacaaatggaaacaggaaaaaatatcagaggaaaggattgactggccgagtgtttatttccaagacagctcgcatgaagtggcagctccttgagcgcagggtcacagacatcatcatgcagaagatgaccatttccaacatggaggcagatatgaatagactcctcaagcaacgggaggaactcacaaaaagacgagagaaactttcaaaaagaagggagaagatagtcaaggagaatggagagggagataaaaatgtggctaatatcaatgaagagatggagtcactgactgctaatatcgattacatcaatgacagtatttctgattgtcaggccaacataatgcagatggaagaagcaaaggaagaaggtgagacattggatgttactgcagtcattaatgcctgcacccttacagaagcccgatacctgctagatcacttcctgtcaatgggcatcaataagggtcttcaggctgcccagaaagaggctcaaattaaagtactggaaggtcgactcaaacaaacagaaataaccagtgctacccaaaaccagctcttattccatatgttgaaagagaaggcagaattaaatcctgagctagatgctttactaggccatgctttacaagatctagatagcgtaccattagaaaatgtagaggatagtactgatgaggatgctcctttaaacagcccaggatcagaaggaagcacgctgtcttcagatctcatgaagctttgtggtgaagtgaaacctaagaacaaggcccgaaggagaaccaccactcagatggaattgctgtatgcagatagcagtgaactagcttcagacactagtacaggagatgcctccttgcctggccctctcacacctgttgcagaagggcaagagattggaatgaatacagagacaagtggtacttctgctagggaaaaagagctctctcccccacctggcttaccttctaagataggcagcatttccaggcagtcatctctatcagaaaaaaaaattccagagccttctcctgtaacaaggagaaaggcatatgagaaagcagaaaaatcaaaggccaaggaacaaaagcactcagattctggaacttcagaggctagtctttcacctccttcttccccaccaagccggccccgtaatgaactgaatgtttttaatcgtcttactgtttctcagggaaacacatcagttcagcaggataagtctgatgaaagtgactcctctctctcggaggtacacagatcctccagaaggggcataatcaacccatttcctgcttcaaaaggaatcagagcttttccacttcagtgtattcacatagctgaagggcatacaaaagctgtgctctgtgtggattctactgatgatctcctcttcactggatcaaaagatcgtacttgtaaagtatggaatctggtgactgggcaggaaataatgtcactggggggtcatcccaacaatgtcgtgtctgtaaaatactgtaattataccagtttggtcttcactgtatcaacatcttatattaaggtgtgggatatcagagattcagcaaagtgcattcgaacactaacgtcttcaggtcaagttactcttggagatgcttgttctgcaagtaccagtcgaacagtagctattccttctggagagaaccagatcaatcaaattgccctaaacccaactggcaccttcctctatgctgcttctggaaatgctgtcaggatgtgggatcttaaaaggtttcagtctacaggaaagttaacaggacacctaggccctgttatgtgccttactgtggatcagatttccagtggacaagatctaatcatcactggctccaaggatcattacatcaaaatgtttgatgttacagaaggagctcttgggactgtgagtcccacccacaattttgaaccccctcattatgatggcatagaagcactaaccattcaaggggataacctatttagtgggtctagagataatggaatcaagaaatgggacttaactcaaaaagaccttcttcagcaagttccaaatgcacataaggattgggtctgtgccttgggagtggtgccagaccacccagttttgctcagtggctgcagagggggcattttgaaagtctggaacatggatacttttatgccagtgggagagatgaagggtcatgatagtcctatcaatgccatatgtgttaattccacccacatttttactgcagctgatgatcgaactgtgagaatttggaaggctcgcaatttgcaagatggtcagatctctgacacaggagatctgggggaagatattgccagtaattaaacatgaatgaagataggttgtaaactgaatgctgtgataatactctgtattctttatggaaaatgttgtcctgtacttactaggcaaaacgtatgaatcggattaactggaaaatatatctgaattcaactgctgactataaatggtattctaataaaattgtgtactatcctgtgtgcttagttttaagatcaaccaatagatatatatcctacaattgatatattgctttattcacacttttattgtggctgaatttttgtgcctatctataaaacacactttcaaattatttgaattaccaagacgtctgcttttgtgacagtcagaaaacacacctggaatacgatgcagcccaccattaactcattcatgtagtttattcaagtgatttatgtatttaaactaaatattgaaaatgttagtcaaattgtggtttgcttgtcaggtatttatatcagtctgtagtggattcccaaatttcaaagctcttttaatgtaatggacaaaaataagatatgagaatattattgatgaattttcataaggtggaattgatcttaatctactaacagagaagggtagacagtttgtgttaaatgttggcatttacttgtattgaccaaagttttgcagctctactatattctgtgctcaggactaaaatgctgttaatttttttttttttttccagtgctgtgcatatattctgtgatgggaaacattgttgatgtcctaacagaaatatattttgatctattttcctatggagttgtttctattatgaccatttaattttgtttttatttaatagtagtatttccttcccttttatctaattttttatatgctgctaaatatattttaaatatactatgtttgcgaaccttggtagctatgatgagagctattatcatctgtggtgggaaaagctatgtaaataggtagattgtatagagagactatcttgtgttgtgcctgtatgaatttttaaaagttgttgactggattttgcaaaaggatgtataatatttctgtctgctcagaatattaatttgtaaattctgcaagtttaatttttatgtagatggtataacatttgaaaatattgtcttatgtgattttttcccctgaaaatatttgcttgtaaatgaaaacttagctagggcttaaataaacatgttgctatgaaatt

SEQ ID NO: 1687 - protein, 914 aa, Homo sapien
QDVMEMKKTKVRLMKQMKEEQEKARLTESRRNREIAQLKKDQRKRDHQLRLLEAQKRNQEVVLRRKTEEVTALRRQVRPMSDKVAGKVTRKLSSSDAPAQDTGSSAAAVETDASRTGAQQKMRIPVARVQALPTPATNGNRKKYQRKGLTGRVFISKTARMKWQLLERRVTDIIMQKMTISNMEADMNRLLKQREELTKRREKLSKRREKIVKENGEGDKNVANINEEMESLTANIDYINDSISDCQANIMQMEEAKEEGETLDVTAVINACTLTEARYLLDHFLSMGINKGLQAAQKEAQIKVLEGRLKQTEITSATQNQLLFHMLKEKAELNPELDALLGHALQDLDSVPLENVEDSTDEDAPLNSPGSEGSTLSSDLMKLCGEVKPKNKARRRTTTQMELLYADSSELASDTSTGDASLPGPLTPVAEGQEIGMNTETSGTSAREKELSPPPGLPSKIGSISRQSSLSEKKIPEPSPVTRRKAYEKAEKSKAKEQKHSDSGTSEASLSPPSSPPSRPRNELNVFNRLTVSQGNTSVQQDKSDESDSSLSEVHRSSRRGIINPFPASKGIRAFPLQCIHIAEGHTKAVLCVDSTDDLLFTGSKDRTCKVWNLVTGQEIMSLGGHPNNVVSVKYCNYTSLVFTVSTSYIKVWDIRDSAKCIRTLTSSGQVTLGDACSASTSRTVAIPSGENQINQIALNPTGTFLYAASGNAVRMWDLKRFQSTGKLTGHLGPVMCLTVDQISSGQDLIITGSKDHYIKMFDVTEGALGTVSPTHNFEPPHYDGIEALTIQGDNLFSGSRDNGIKKWDLTQKDLLQQVPNAHKDWVCALGVVPDHPVLLSGCRGGILKVWNMDTFMPVGEMKGHDSPINAICVNSTHIFTAADDRTVRIWKARNLQDGQISDTGDLGEDIASN

SEQ ID NO: 1688 - DNA, 2165 bp, Homo sapien
ctattttgtttgtagtattgtggaacagtcttgttatggagtgccagcttagaggttgttgcaaacttgtctagaagtgagagcatggttttttttagccctttgagagtctacatctaatgaacattcttgctcacccataaataacgtcaagcctcaatgtcaccgtcacgttgggatactctttctcatctggcatcctagacaggacaaggttggttacctttccttccatgaaccatgaacctgtgacggcatcattcatcctgacttcaccaagctccgcctgtgggtgaggccagagctcccactggcaatttttagaagagccagaggctccctgcttcctctagaaataacagttcagggtgaagcatggagggtttcagttcccagacaacggaaccatttagagacaacacagttggacatttccactttttccttgattcctggaagtccagtgggttctgcagctgaaaaagccctgggtcccagcagcagagagacaggacagaggggatgcttgggcggggagggacggtaacctgcagaacagattccatttttatagaacgagtacacgtttgctaaaacagtcctgctttcccagactggattcccaccacagggacagtcggaactcaggactagctccagcgacatctttcctccgaattcaagccttctatcacaatgtcaaaacagctatttataaagccattttcattgtacttgataacagcacgagtcccaaaacttttagaaataaaataggacattggcttgattgaaaagagggactttttaaaaattgttctttcgtcagaagccttttggatgacttacaatagctctgatgaagataccaccccagcgtcagtccaataggtcagtgagtttcaacaggcatccatccctcccatgaagggattctggtgatgggaagtttctgtaatgacaggaaagcattgaccctcattgattgtcaactttggtattagccatgaaagacaggatgctcattgggtgttctgtagagtgaggaatgctgcctattccctcccagaacgtctgacccaggggtgtgtgttgaggagccctgggggaaatggaccaagttttcccacagagcagtattaggctgaagagcaggtgactggtaggccccagctcccatcattccctcccaaagccattttgttcagttgctcatccacgctggattccagagagttttccaatttgggaagccatgagaaaggtttttaaatcttgggaagatggagagagggacataggatagttgactccaacatgacaggaagaggctggagattgggaattggccatcaaccaagcctgtagtagtaaagccatggtcccgcattggaattacttggggaacttatacagttctgatacccaggctctcctagaccagttcaaccaattctaggtgggggactcaggcatcagtgtgtttcgtagctccccgggtgttttccctgtgcagccgagcttgggaaactgccatgctttttggatgtcaaggcgctgttggaggctgggtgtgacagcacagagccaggttgtcttgtggaaaccacagccacgggtttgccactggctcagcatggcctcactgccagtcccagcctggctgagggacaagatggtttctcttgggagttcctgagtggagcacccttccaggctttttgaaagccagctgatctgtggagccttgttaagggactcaatacggtgtttggatattgatgtttttccttgagactgtcttgtccatcaataaagatggaggatgtctcctctttgaaccccgcttccccaccagtactctctctcccttagagtttatgagttattcaaggaggagacttcttaaagacagcaacgcaattcttgtaacttgtgtaaatagccccatctttcagagtgataccatttctacatttgataatgcctgtattcctgtaggatgtatatagtttaggggattttttttttgtttggttttgttttttagaagtcaatatgtctggttttatttattgcttgaaaaagatcatttgaaaaaaataaatacattttcaattccagaaaggatctatgtcgggtgcggagaaagaggtaatgaaatg

SEQ ID NO: 1689 - protein, 9 aa, Homo sapien
MSGAEKEVM

SEQ ID NO: 1690 - DNA, 2686 bp, Homo sapien
gcgcgagaggacgtgctctgccagccagtgggaaggcaggccgcgcgcgcgggagcgcgggaggatcggcggctcgcggtcactggtccctggctcggttccccgcaccccggggctcacacttacccgcgcggaggagcagcggccgggtgtccacccccatcctgcgcccagtctcctcgattcccctcgctctgagccgggagagccgaacagctgaagagagttcactgactccccagccccaggtgggccttgtgcacatcatgaccagttttgaagatgctgacacagaagagacagtaacttgtctccagatgacggtttaccatcctggccagttgcagtgtggaatatttcagtcaataagttttaacagagagaaactcccttccagcgaagtggtgaaatttggccgaaattccaacatctgtcattatacttttcaggacaaacaggtttcccgagttcagttttctctgcagctgtttaaaaaaattcaacagctcagttctctcctttgaaataaaaaatatgagtaaaaagaccaatctgatcgtggacagcagagagctgggctacctaaataaaatggacctgccatacaggtgcatggtcagattcggagagtatcagtttctgatggagaaggaagatggcgagtcattggaattttttgagactcaatttattttatctccaagatcactcttgcaagaaaacaactggccaccacacaggcccataccggagtatggcacttattcgctctgctcctcccaaagcagttctccgacagaaatggatgaaaatgagtcatgaacacagaaagtctaagaggagaaatatgatggatgaagagctctgtagatgctgtatagacactaaataagagttgattagggtagtatattatagtcatctgttatgctgtgaaatttggaattcagtattatcattttgaagtctgtaaattgtgttagtcattaacttagtcacctgttgtattctggatctacacaaaattattttaactgctcttattaatctgtgaggattaatatacaaaaagtatcctttgagatgaagtcgtgttctcaaaataaggttatattattttctttttctgcttgattttcatcttgtgttttgctttgtttttgtaaggaaccatctcttggtttggtcacatcagttcacaacagccatttgttttcaaggtcaaggctccaggcaggttgttactggtgtttgcagcctgtcagtacttgcagtactggaataggttctaggctagtgtctgcgcgtcactgtggttttagcatgggaggacttatttgagaaatactaccttacttttctatgatttctttttacagagttatagtgtgtttactcctaagatgacagttctctttgtctatattcagcatctaagacaaatatttaaacattttaaagaaccactgtgttaagtttaggattatttacttaccaaattagaagtttgacttttatgtgttatacacaatcttaaaatttcacgaattcacctttttaatagtatccatgtacataataaaatcaaagtttaattagccattttctttgaatttttttctaaataagggaaataactgttcttgggccactttacagagataaatgtatgtgaatgtttatgataaacgcttaaatatttctaaaatattaacttcaaaaaagtctttttcagttcttaaataaaaatttatttatttaagatacttattcgacttatcttaactaaggtagctatgaatgttaagtagatgaggtaaccattcagttaagttaaattgtagcattgccaggtagtgaggctcactgtacaattttccaggtaaatgaaatttcctgtagtaagaggtccgtatttttgtaacagccttttaaaaatgcttttgggaaccctccagcctcttaccaaaagaggctttaaacctcatcttgattcagactgtcagtctattcctgggcagtagtatgtgatgtccagcaccctaaccccgactccccagccctgggactattccagtagagtgaaatatttgtccctgtacaaagtggcctgaatgactgttggagttcctgtgtctggttttcctgtttattccctgtgatgcccagagtaatggcccatccaaagatgtccagatgtccatgtgctagtctccagaacttgtaactgtgttgttatgtggcaaaggggaatgaaggctgcagatggaagtaaaatagattatgctggattatctgggtgtgcccaattgatcaccggatccgtaaaagtggaagagaggcagatcaggatgtcagcgtgatgaggtgtgagacagacttgacttgctgttgctgggaggaaggggaggtcatgagccaaggaatgtggacagtctcttgaagctggaaagtgtgcattggacatctggaagccagaaaagacaaagaaatatccagaaaggaacaaagtcttgtggacaccttgattttggtccagtgagaatatgtttgacttgttaacctacaaaactttatgatgataaatttgtgttggtcgtaagccactaaatcacagtaatttgttatagcagcagatagaaaactaatatactccctttaatataaaaaaaaaaaaaaaaaaaaa

SEQ ID NO: 1691 - DNA, 1308 bp, Homo sapien
tacaggcgtgagccaccacccccggctgtattttcagagaggagagcttggtgtttttgtggtgccaagtggtaagataatgtctctttgaggcttcctatggactgcctttattttagtaaactcaagacaccagttaacctcaacagagttttggccttattagaatttgttgtgcatcttattgaaagccaggtttacatcacctcaccccattattctttttagttaaataaatttaccatgccaagtaaccagaatggagcaaattggttgatctttaaggcagtaggtttgactagctagctatcattattgtcacatctaatgctaggcaccagaaaccatttgagccaggagtgtgaatgaataattccagagacactttagacattttttaatgttttatatgaacattttacatttgtgtgattgccttagatattaaattttcctagtgctgataaaaacagcaacattcataacttattttatatattgttccaaagaaaagaatttgttttaatggtttcaaaataactgcacctgaatttgtttatgtgccttaagttctctagtgctatttcaacttttttttcaatctaaatgaagcttaccttagataaggttcatatttgtttcctatagagtaaataaacttccccttcttaaattgtgtaataagcaccaacgtgtggttgcttggcagaatgagaatgttaagggagattgttggatgtttggagtttcattatattttttgtttttattttttgatacctaggtgctttttaaaatattcagacaaatatctatcttacattgattaaacccgtgtaaattcatttgcagtatctacatcgaatgtcaaaaaagtatacttatttttgttccatacttatgtacaattttttccctcttcaggctttttcatttacctttttgaaaaagcacttactctccccttccctatcacccctcccccaaggtttctttatttaaatttttattgagagttgttggagctctaagacaatacaaatttagagttgaacaaaagtataatctgctttacaactagtatagacctaaggtcatttgctttcaattagaggctccagagtcttcatagtggaaagaatgctttgtatttaattgttcttagttaagttgtagcacgtgaatacttacttacatgttttgtttaaatatacttcttgcatagtttaattttttaaaagttgtatctaataaaatgtcttttaaccattattacttgactatatggttgtcttaaattttgttacg

SEQ ID NO: 1692 - protein, 29 aa, Homo sapien
TGVSHHPRLYFQRGELGVFVVPSGKIMSL

SEQ ID NO: 1693 - DNA, 2518 bp, Homo sapien
gtggggtttgcagaggagacaggggagctttgtgtacccggagcaatgaacaagcggcgacttctctacccctcagggtggctccacggtcccagcgacatgcaggggctcctcttctccactcttctgcttgctggcctggcacagttctgctgcagggtacagggcactggaccattagatacaacacctgaaggaaggcctggagaagtgtcagatgcacctcagcgtaaacagttttgtcactggccctgcaaatgccctcagcagaagccccgttgccctcctggagtgagcctggtgagagatggctgtggatgctgtaaaatctgtgccaagcaaccaggggaaatctgcaatgaagctgacctctgtgacccacacaaagggctgtattgtgactactcagtagacaggcctaggtacgagactggagtgtgtgcataccttgtagctgttgggtgcgagttcaaccaggtacattatcataatggccaagtgtttcagcccaaccccttgttcagctgcctctgtgtgagtggggccattggatgcacacctctgttcataccaaagctggctggcagtcactgctctggagctaaaggtggaaagaagtctgatcagtcaaactgtagcctggaaccattactacagcagctttcaacaagctacaaaacaatgccagcttatagagatctcccacttatttggaaaaaaaaatgtcttgtgcaagcaacaaaatggactccctgctccagaacatgtgggatgggaatatctaacagggtgaccaatgaaaacagcaactgtgaaatgagaaaagagaaaagactgtgttacattcagccttgcgacagcaatatattaaagacaataaagattcccaaaggaaaaacatgccaacctactttccaactctccaaagctgaaaaatttgtcttttctggatgctcaagtactcagagttacaaacccactttttgtggaatatgcttggataagagatgctgtatccctaataagtctaaaatgattactattcaatttgattgcccaaatgaggggtcatttaaatggaagatgctgtggattacatcttgtgtgtgtcagagaaactgcagagaacctggagatatattttctgagctcaagattctgtaaaaccaagcaaatgggggaaaagttagtcaatcctgtcatataataaaaaaattagtgagtataaaatggtggcaaatctactttgtttaaaacagtatgaatgcctattctcagatcactacatttaaggcattagaaacttttaaaaagttatcttaaaaatatacataaaatttgaacaacttaaaaattgaactaatttctaaaatatatcctataattatataatacacagacatttgttaccatctaagcattttgtatatgaaaaaattatgcaatttacaagaaaatattttacaaaataatctggaatacttgctaaagctgtataaaaagtatactaaattttaggctgggcgcagtggttcatgtctgtaatcccagcacttcgggaggccaaggtgggcagatcatttgaggtcaggagtttgagaccagcctggccaacatggtgaaaccctgtctgtaattaaaaaaatacaaaaattagccaagtgtggtggcatgcgcctgtaatcccagctactcgggaggctgagtcagaagaattgcttgaacccaggtggtggaggttgcagtgggtcaagattgcaccactgcactggcacggagaagcgagactcctttgggggagaaaaaaacatactcaatttaaaaaatttaatctatatttgacaatgtagcctaaggtgcccattagttgatacatcattatagggcaagtgaaattctagattaattcttgaacagaaataagattaagctgtaaatatatttagacttttcactgcctgatcttgaatatcagtttcttttggaaaggagaaaatgcaacttttctggccactgttaacaactgcaatctaaaattttttacatcaaatattgtaaaaagttaaatttccaagacaaagaccaagaacagtatcattactttgcaaaggaaagaaatataaagaatacaacttaaaattaacctgtggatctgaaatataaaatgttattaaaaataaattaatgttaaggctagaactgaagattatagtaaccggaacaattatagccatttattgcaaagtttggaagatatcaagcttagtaacattctgttcatttgcataaatgtcatgcagaacaataacaagtagcactgttgaaaaatatagacatttattataaaatcaattggtttgataagaaagcaattatttaaaaagtttaatacaaatacatgttaagtgtacaaattaggattcttttgggcaaacaagttgttatctaaagaagaagcaaaacctccttaacagttgtaataaaacctatgcctgaaaagttggtggctattaaaaaa

SEQ ID NO: 1694 - protein, 372 aa, Homo sapien [sequence omitted]

SEQ ID NO: 1695 - DNA, 1680 bp, Homo sapien
gggctgcggtacggcgtgttggtcccagcggttcagctgaggtagggacgtgctgtaggccggaatgttaccggctgttggatctgcggatgaggaggaggatcctgcggaggaggattgtcctgaattggttcccatggagacgacgcaaagcgaggaggaggaaaagtctggcctcggcgccaagatcccagtcacaattatcaccgggtatttaggtgctgggaagacaacacttctgaactatattttgacagagcaacatagtaaaagagtagcggtcattttaaatgaatttggggaaggaagtgcgctggagaaatccttagctgtcagccaaggtggagagctctatgaagagtggctggaacttagaaacggttgcctctgctgttcagtgaaggacaatggccttagagctattgagaatttgatgcaaaagaaggggaaatttgattacatactgttagagaccactggattggcagacccaggtgcagtggcttctatgttttgggttgatgctgaattagggagtgatatttaccttgatggtatcataactattgtggattcaaaatatggattaaaacatttaacagaagagaaacctgatggccttatcaatgaagctactaggcaagttgctttggcagatgccattctcattaataaaacagacctggttccagaagaagatgtaaagaaattaagaacgacaattagatccataaatggactaggacaaatcttagaaacacaaagatcaagagttgatctctctaatgtattagatcttcatgcctttgatagtctctctggaataagtttgcagaaaaaacttcagcatgtgccaggaacacaacctcaccttgatcagagtattgttacaatcacatttgaagtaccaggaaatgcaaaggaagaacatcttaatatgtttattcagaatctcctgtgggaaaagaatgtgagaaacaaggacaatcactgcatggaggtcataaggctgaagggattggtgtcaatcaaagacaaatcacaacaagtgattgtccagggtgtccatgagctctatgatctggaggagactccagtgagctggaaggatgacactgagagaacaaatcgattggtcctccttggcagaaatttagataaggatatccttaaacagctgtttatagctactgtgacagaaacagaaaagcagtggacaacacgtttccaagaagatcaagtttgtacataacactagaggcatttcttatcaaaaggattggataataaaaataagtttctactgggtatatttcaagcatttatttattactttagttacgaattccaatatactttaaaatggtatttgttttacagcatacataaaatgtagcaaatcagtactgtaaaacatttaacattcatacagttatatataatatccttttttttaaagaatggtatttcacaaaaatatcttttgaaattggctttggagtttacatatactgaacatgaaagtttataataatgatgatacaactttcaacattgtcattttttcttagaacttcagctgattgcagagatataatgattacattgttattaaatttttttaacacaagtaagtgtcaccattttatgacatgaaataaaaggttatgactgttatcg

SEQ ID NO: 1696 - protein, 395 aa, Homo sapien
MLPAVGSADEEEDPAEEDCPELVPMETTQSEEEEKSGLGAKIPVTIITGYLGAGKTTLLNYILTEQHSKRVAVILNEFGEGSALEKSLAVSQGGELYEEWLELRNGCLCCSVKDNGLRAIENLMQKKGKFDYILLETTGLADPGAVASMFWVDAELGSDIYLDGIITIVDSKYGLKHLTEEKPDGLINEATRQVALADAILINKTDLVPEEDVKKLRTTIRSINGLGQILETQRSRVDLSNVLDLHAFDSLSGISLQKKLQHVPGTQPHLDQSIVTITFEVPGNAKEEHLNMFIQNLLWEKNVRNKDNHCMEVIRLKGLVSIKDKSQQVIVQGVHELYDLEETPVSWKDDTERTNRLVLLGRNLDKDILKQLFIATVTETEKQWTTRFQEDQVCT

SEQ ID NO: 1697 - DNA, 4699 bp, Homo sapien
cagggctggcttttttttttttaataagatagctggtgcccaagattgttttccaccttaaggataaaacctgttaagaaagcctgaacaattacaaaaaaggaagaaaaggagacttggccaactggtgtcaggagtcttaacaaggtcatagtttgccagcccctgccctaaacaaataattcttgaatgcctactgtggtgtgtaagatatgagtaaataccagggatacacagagaacaaaagagaaaaactgctattcttgtgaaacttggaagttggaggagacttggaagatgcagaactggatgactactcattctcatgctatagccagttggaagtgaatggatcgcagcactcactgacctgtgcttttgaggacccagatgtcaacaccaccaatctggaatttgaaatatgtggggccctcgtggaggtaaagtgcctgaatttcaggaaactacaagagatatatttcatcgagacaaagaaattcttactgattggaaagagcaatatatgtgtgaaggttggagaaaagagtctaacctgcaaaaaaatagacctaaccactatagttaaacctgaggctccttttgacctgagtgtcatctatcgggaaggagccaatgactttgtggtgacatttaatacatcacacttgcaaaagaagtatgtaaaagttttaatgcacgatgtagcttaccgccaggaaaaggatgaaaacaaatggacgcatgtgaatttatccagcacaaagctgacactcctgcagagaaagctccaaccggcagcaatgtatgagattaaagttcgatccatccctgatcactattttaaaggcttctggagtgaatggagtccaagttattacttcagaactccagagatcaataatagctcaggggagatggatcctatcttactaaccatcagcattttgagttttttctctgtcgctctgttggtcatcttggcctgtgtgttatggaaaaaaaggattaagcctatcgtatggcccagtctccccgatcataagaagactctggaacatctttgtaagaaaccaagaaaaaatttaaatgtgagtttcaatcctgaaagtttcctggactgccagattcatagggtggatgacattcaagctagagatgaagtggaaggttttctgcaagatacgtttcctcagcaactagaagaatctgagaagcagaggcttggaggggatgtgcagagccccaactgcccatctgaggatgtagtcatcactccagaaagctttggaagagattcatccctcacatgcctggctgggaatgtcagtgcatgtgacgcccctattctctcctcttccaggtccctagactgcagggagagtggcaagaatgggcctcatgtgtaccaggacctcctgcttagccttgggactacaaacagcacgctgccccctccattttctctccaatctggaatcctgacattgaacccagttgctcagggtcagcccattcttacttccctgggatcaaatcaagaagaagcatatgtcaccatgtccagcttctaccaaaaccagtgaagtgtaagaaacccagactgaacttaccgtgagcgacaaagatgatttaaaagggaagtctagagttcctagtctccctcacagcacagagaagacaaaattagcaaaaccccactacacagtctgcaagattctgaaacattgctttgaccactcttcctgagttcagtggcactcaacatgagtcaagagcatcctgcttctaccatgtggatttggtcacaaggtttaaggtgacccaatgattcagctatttaaaaaaaaaagaggaaagaatgaaagagtaaaggaaatgattgaggagtgaggaaggcaggaagagagcatgagaggaaagacagacaggaaaataaaaaatgatagttgccattattaggatttaatatatatccagtgctttgcaagtgctctgcgcaccttgtctcactccatcctgacaataatcctgggaggtgtgtgcaattactacgactactctcttttttatagatcattaaattcagaactaaggagttaagtaacttgtccaagttgttcacacagtgaagggaggggccaagatatgatggctgggagtctaattgcagttccctgagccatgtgcctttctcttcactgaggactgccccattcttgagtgccaaacgtcactagtaacagggtgtgcctagataatttatgatccaaactgagtcagtttggaaagtgaaagggaaacttacatataatccctccgggacaatgagcaaaaactaggactgtccccagacaaatgtgaacatacatatcatcacttaaattaaaatggctatgagaaagaaagagggggagaaacagtcttgcgggtgtgaagtcccatgaccagccatgtcaaaagaaggtaaagaagtcaagaaaaagccatgaagcccatttgatttcatttttctgaaaataggctcaagagggaataaattagaaactcacaatttctcttgtttgttaccaagacagtgattctcttgctgctaccacccaactgcatccgtccatgatctcagaggaaactgtcgctgaccctggacatgggtacgtttgacgagtgagaggaggcatgacccctcccatgtgtatagacactaccccaacctaaattcatccctaaattgtcccaagttctccagcaatagaggctgccacaaacttcagggagaaagagttacaagtacatgcaatgagtgaactgactgtggctacattcttgaagatatacggaagagacgtattattaatgcttgacatatatcatcttgcctttcttggtctagactgacttctaatgactaactcaaagtcaaggcaactgagtaatgtcagctcagcaaagtgcagcaaacccatctcccacaggcctccaaaccctggctgttcacagaaccacaaagggcagatgctgcacagaaaactagagaaggggtcataggttcatggttttgtttgagatttgttgctactgtttttctgttttgaattttcttctttgttctgtttttactttatttagggggactaggtgtttctgatattttagttttcttgtttgttttgttttgtgttgtctgtgaatggggttttaactgtggatgaatggaccttatctgttggcttaaaggactggtaaaatcagaccatcttattcttcaggtgaatgttttactttccaaagtgctctcctctgcaccagcagtaataaatacaatgccataatcccttaggtttgcctagtgcttttgcaattttcaaagcacttccataagcattccttccacctccttgataggcatttatggaaagcctgctacatgtcaatcatactgttaggcacaggggacctaaagacacataaaaggatggcattctgcctcataaattgcaaaacctaatgaaagtgactgcttggtaaacaaattattattatattataaaatgctataaaagagccatattgaaagtgccctgttggagacagggcaaatgccacaaaaatgatgtaaatttacatggaggaaaagtagaatctgcctggtttgtaggcagcagaagacatttttcatcagtgggcaggtgttctttaccttttgtagaaatgggagtcaagtctcaaataggaggctccacaaaatctcatgccaggtctctgataccttattcacagaagttctttgaagtatttattgttattttctttgacttatgggaaaactgggacacaggaagacaggtaaattacccaacctcacacgttaagtcagaactgggagccataattttgtatccctggtataaatagacaatctcttgaagaaatgaagagatgaccatagaaaaacatcgagatatctccagctctaaaatcctttgtttcaatgttgtttggcatatgttatctttggaatttagtgtctgagcctctgtctgttactgtagtatttaaaatgcatgtattataatcatataatcataactgctgttaattcttgattatatacctagggacaatgtgtaatgtaagattactaattggttctgcccaatctcctttcagattttattaggaaaaaaaaataaacctcctgatcggagacaatgtattaatcagaagtgtaaactgccagttctatatagcatgaaatgaaaagacagctaatttggtccaacaaacatgactgggtctagggcacccaggctgattcagctgatttcctaccagcctttgcctcttccttcaatgtggtttccatgggaatttgcttcagaaaagccaagtatgggctgttcagaggtgcacacctgcattttcttagctcttctagaggggctaagagacttggtacgggccaggaagaatatgtggcagagctcctggaaatgatgcagattaggtggcatttttgtcagctctgtggtttattgttgggactattctttaaaatatccattgttcactacagtgaagatctctgatttaaccgtgtactatccacatgcattacaaacatttcgcagagctgcttagtatataagcgtacaatgtatgtaataaccatctcatatttaattaaatggtatagaagaac

SEQ ID NO: 1698 - protein, 296 aa, Homo sapien [sequence omitted]

SEQ ID NO: 1699 - DNA, 478 bp, Homo sapien
  Unsure 59: Unknown base
ttctcttctagtgatgtggcacggtgtccgtgagcttgtgactgcagcgatacgctgcnttgtggcgtgtcggccaggtggcgactacagcagggactggctgccaacccctccggctacgggccccttaccgagctcccagactggtcatatgcgggggtatgatcctgcttaattggataattggtgactgaggaagatggtgaagattttttctacttgttatttactatggccgccctgctcccccaatgaaaggccagcttcgaagaaaagctgaaagggagacgtttgcagtgagtgagacgagttgtactgctgtcacaggaaatggacgctggattacaagcatggcagctcaggcagcagaagttgcaggaagaacaaaggaagcaggaaaatgctcttaaacccaaaggggcttcactgaagagcccacttccaagtcaataaaaagcaactcctgcctcccttcctc

SEQ ID NO: 1700 - DNA, 1107 bp, Homo sapien
cgggcgagaagggcagacgggacatgcagcctcttccgcctgagccccggaagtgatgtggctgcggcatcgcggcctcgctatgtctgccattttcaattttcagagtctattgactgtaatcttgctgcttatatgtacctgtgcttatattcgatccttggcacccagcctcctggacagaaataaaactggattgttgggtatattttggaagtgtgccagaattggtgaacggaagagtccttatgttgcagtatgctgtatagtaatggccttcagcatcctcttcatacagtagctggggaaaatgccagaatgtagttgccatcagatttgattgtgaacaaggactgactgcagaaaataatggaaaggatgtttaactcttttatctccgaacattgaatgagataaatttccagatgctgttctctattttaatgttattggaccaatgttctgtataaacaattaagatgtaaccatttaatagtctgtaacaatcaacctcagtactgtcactacaatattacattctgcaaatgttattctgttgtatcagatacaaaattttagtgaggtatctctaaggcacatagtagaaaacaaaattggttaattactcaagttcctttcactgtgatttggaaatgatttaatctttatagaatgagaaccttttttggactagcttttttattaaaatggctcaatttgtgttgataaggattgcattaatatttaatagtgcttgcttttcctctgggcacaccattttgatcattaaccagagtacctctactcttagcaaactctagtttatgacaagtatttaaaatatttaaaacaagcttatgcagttcttaaggacgaaggtaaatgagatgtaacttaaaaatagtattgggaaaatgttgatagttaacattagtggatttagactagccaaatgacatagtaggctctgaaacatcttgtcaagtatatgtattttgtgcatgaatttttgctggaaagctgtctttctctgaaaaacacaacgttcttagaatgaaaagaacaattataaaataaaaaaaaaatttaaaaaaaactgggcggggg

SEQ ID NO: 1701 - protein, 72 aa, Homo sapien
MSAIFNFQSLLTVILLLICTCAYIRSLAPSLLDRNKTGLLGIFWKCARIGERKSPYVAVCCIVMAFSILFIQ

SEQ ID NO: 1702 - DNA, 3189 bp, Homo sapien
gggagaacgcgagtgttagttaacatggcttggtgtgtggccacagctgacccggcgcatacctcccgtcctctctttacagggctggcggtgtctcggggctcggctggccatgcctggagcgcggggtttgactgggccgccgttgttgtagtgaccgggaggcgctgccgctctgggcagacggttccgggagccgcacggtcccctctccttccccatcctctcccctcccctctccgggttcccccacccacaggagccttgggccgaccactcccccgatggcctcagccacggaggaccccgttctggagcgttatttcaaaggccacaaagctgcgatcacctccttggacctcagccccaacggcaagcaacttgctactgcttcttgggatacctttctcatgctatggaatttcaagccacatgctagagcttacagatatgtgggtcacaaggatgttgtaaccagcgtgcagttttctccacatggaaacttattggcgtctgcctcacgagacagaaccgtgagactctggattcctgataagagaggaaaattctcagaatttaaagctcatacagctccagttcgaagtgtagacttttcagctgatggccagtttctagctacagcttctgaagacaaatccataaaagtatggagcatgtatcgccagcgcttcctgtattccttgtatcgacatacacactgggtacgctgtgccaaattttcacccgatggaagactaattgtgtcatgtagtgaggataaaactattaaaatttgggataccacaaataagcaatgtgttaataacttctcagatttcgttggatttgcaaattttgtggactttaaccctagtggtacatgcatagcttcagcaggttctgatcaaactgtgaaagtctgggatgtaagagtgaacaaattactacagcattaccaagttcacagcggtggagttaattgcatatcattccatccttcgggtaactatctcatcacagcttcttcagatggtacccttaagattctggacctcttagaaggaaggctcatctatacacttcaaggacatacgggacctgtctttactgtttcattttcaaaaggtggagagctatttgcatcaggaggtgcagacacacaggtcttattatggaggactaactttgatgaattgcattgtaaaggtcttaccaaaagaaatctcaaaagattacattttgattcaccaccacatcttcttgatatctacccaagaacaccacatccccatgaggaaaaagttgagactgtagaagatttttttcttcatcttttgagattaatccaaagcttgaggtaatcgatttgcagatctctactccccctgttatggatatcctttcttttgattctaccacaacaacagaaaccagtggtaggactctgccagacaagggtgaagaggcctgtggatatttcttgaacccttccttaatgtcaccagaatgtttgccaacaaccacgaaaaagaaaacagaagacatgagtgacctcccctgtgaaagtcaaaggagcatacctctcgctgtgactgatgctttagagcatattatggaacaactcaatgttttgacacagactgtttcaatcttggagcagcgactgactttgacagaggataagctgaaagactgccttgaaaatcagcaaaagcttttcagtgctgtccaacagaaaagctgaataaaaaattcattttcatttgttgggcagaggcccaataaatgaacaaatgtacatacactcaggaaggtagtacaagatactccatacaacacaaccatgtgctatttatcatggcatttcttaaaagggtgagcaacagaacaaaaggcagaaaaggcatacctaaggactaatttaaacacatatcaatgtgaaggactaatttaaattactatcatttatgattgcagtaataaagtgataagcattcaagcaactctgtattttccccatattattttaaatgtccattttcatttataggccaaatcctgccaggaaagtaaccagatctctggatttcactgttaagtcatttcagattgaccatattcagacagtcatggggtgaaataattcacttacctccaaaatagcatcctatatgccaataatgagttattgatctgactagttgtatgtctttctgttcaaaatagaaattatcctttcttactaatgccttgaaagaatgaacaaataaaaattcccagaccacagaatttccacagcaagaatacacttattttaattaacaatagcacagatatagcatagggcagtgggttttttagttaatttatggcgtactttgtttatccattggccaacctgaaggaaatgaaactcacctatctttctatcacagatgaatgtgctagatgaatgatttgggttgtatctgatcatggttcacaaaaattatgttagtgtgttttcagtatgctaaaaagtcagagtgatacaaaagtgatatttaaaaatatacacacatgtatgtacacatgcttcagaaatattgttgcttagggtgatttgggcagctaaatagtaagtactttttaaaatttttgcatcatcatcttcctatttaatgaattgtgatttaaaacaaaatgaaaataagccaggtattctaaaagatcctggatacaaattaagaattttgctttattttaaaccaaattgagattaaattgaagaaaagcaagcaaattaatttcagcttgattatcaacctgtatcaagaacaaaaatgggaggaggtgtccacatttatggtgtgtataggtaacatggggaaaatgctattctgtgttttggaaaagaagaaatagtgccgtcctatttatttctatatttagaaatttttctcaaagaaatttcaattgtatctatgagatgggtttctaagtatcttattgtgtgttataagtgccttttaatatcatactaagtgtgagcttctggacattttcaagagcttacaaaaactaagtggcattgtatttttataaccccattgagaagactaagtaagaaatgaaatgtcctatcaattttattttgtcatgcttcaaacaataaagacatttctgctttaaaagacaaacaaaaaaaaa

SEQ ID NO: 1703 - protein, 358 aa, Homo sapien
MASATEDPVLERYFKGHKAAITSLDLSPNGKQLATASWDTFLMLWNFKPHARAYRYVGHKDVVTSVQFSPHGNLLASASRDRTVRLWIPDKRGKFSEFKAHTAPVRSVDFSADGQFLATASEDKSIKVWSMYRQRFLYSLYRHTHWVRCAKFSPDGRLIVSCSEDKTIKIWDTTNKQCVNNFSDFVGFANFVDFNPSGTCIASAGSDQTVKVWDVRVNKLLQHYQVHSGGVNCISFHPSGNYLITASSDGTLKILDLLEGRLIYTLQGHTGPVFTVSFSKGGELFASGGADTQVLLWRTNFDELHCKGLTKRNLKRLHFDSPPHLLDIYPRTPHPHEEKVETVEDFFLHLLRLIQSLR

SEQ ID NO: 1704 - DNA, 1088 bp, Homo sapien
ggaattcggcacgagcccgattccgcgcccgccatggccgacaaaatggacatgtctctggacgacatcattaaactgaaccggagccagcgaggcggccggggcgggggccgcggccgggccggctccagggccggccgccgcggtggggcgcaggccgccgcgcgagtgaatcgaggcggcgggcccatccggaaccggccggccatcgcccgcggcgcggccggcggaggcggcaggaaccgaccggcgccctacagcaggccaaaacaacttcccgacaagtggcagcacgatcttttcgacagtggcttcggcggtggtgccggcgtggagacaggtgggaaactgctggtgtccaatctggattttggagtctcagacgccgatattcaggaactctttgctgaatttggaacgctgaagaaggcggctgtgcactatgatcgctctggtcgcagcttaggaacagcaaacgtgcactttgagcggaaggcagatgccctgaaggccatgaagcagtacaacggcttccctctggatggccgccccatgaacattcagcttgtcacgtcacagattgacgcacagcggaggcctgcacagagcgtaaacagaggtggcatgactagaaaccgtggcgctggaggttttggtggtggtggaggcacccggagaggcacccgcggaggcgcccgtggaagaggcagaggtgccggcaggaattcaaagcagcagctttcggcagaggagctggatgcccagctggacgcctataatgcgagaatggacaccagttaaacagaccagcaaatccgcgtgcggaacaggacccaggcgtctcctcttgctccctggttggggggcggtggctggggctgtgcgcccaatgatggatttgtttcttttatgttttaaaataggatttaaaaactcatgtaaaggttttttttttttcttttttttttttttaattctgaaacagacctgttttgtaccgagttatttttgggataaattttactggttgctgttgtggagaaggtggcgtttccaccttttccataataaaatagaaatgtgtgtaa

SEQ ID NO: 1705 - protein, 255 aa, Homo sapien
MADKMDMSLDDIIKLNRSQRGGRGGGRGRAGSRAGRRGGAQAAARVNRGGGPIRNRPAIARGAAGGGGRNRPAPYSRPKQLPDKWQHDLFDSGFGGGAGVETGGKLLVSNLDFGVSDADIQELFAEFGTLKKAAVHYDRSGRSLGTANVHFERKADALKAMKQYNGFPLDGRPMNIQLVTSQIDAQRRPAQSVNRGGMTRNRGAGGFGGGGGTRRGTRGGARGRGRGAGRNSKQQLSAEELDAQLDAYNARMDTS

SEQ ID NO: 1706 - DNA, 2012 bp, Homo sapien
gcggctgtccagtcgtagcccggccgcccgcgcctgtccggtccggtccggccacggaggcagcgcagcggcgggactccgagcctaccccgccgagtgagctgcgccgcaccgtgccgtcccacccggcacccaccagtccgatggggccgcagcggcggctgtcccctgccggggccgccctactctggggcttcctgctccagctgacagccgctcaggaagcaatcttgcatgcgtctggaaatggcacaaccaaggactactgcatgctttataacccttattggacagctcttccaagtaccctagaaaatgcaacttccattagtttgatgaatctgacttccacaccactatgcaacctttctgatattcctcctgttggcataaagagcaaagcagttgtggttccatggggaagctgccattttcttgaaaaagccagaattgcacagaaaggaggtgctgaagcaatgttagttgtcaataacagtgtcctatttcctccctcaggtaacagatctgaatttcctgatgtgaaaatactgattgcatttataagctacaaagactttagagatatgaaccagactctaggagataacattactgtgaaaatgtattctccatcgtggcctaactttgattatactatggtggttatttttgtaattgcggtgttcactgtggcattaggtggatactggagtggactagttgaattggaaaacttgaaagcagtgacaactgaagatagagaaatgaggaaaaagaaggaagaatatttaacttttagtcctcttacagttgtaatatttgtggtcatctgctgtgttatgatggtcttactttatttcttctacaaatggttggtttatgttatgatagcaattttctgcatagcatcagcaatgagtctgtacaactgtcttgctgcactaattcataagataccatatggacaatgcacgattgcatgtcgtggcaaaaacatggaagtgagacttatttttctctctggactgtgcatagcagtagctgttgtttgggctgtgtttcgaaatgaagacaggtgggcttggattttacaggatatcttggggattgctttctgtctgaatttaattaaaacactgaagttgcccaacttcaagtcatgtgtgatacttctaggccttctcctcctctatgatgtattttttgttttcataacaccattcatcacaaagaatggtgagagtatcatggttgaactcgcagctggaccttttggaaataatgaaaagttgccagtagtcatcagagtaccaaaactgatctatttctcagtaatgagtgtgtgcctcatgcctgtttcaatattgggttttggagacattattgtaccaggcctgttgattgcatactgtagaagatttgatgttcagactggttcttcttacatatactatgtttcgtctacagttgcctatgctattggcatgatacttacatttgttgttctggtgctgatgaaaaaggggcaacctgctctcctctatttagtaccttgcacacttattactgcctcagttgttgcctggagacgtaaggaaatgaaaaagttctggaaaggtaacagctatcagatgatggaccatttggattgtgcaacaaatgaagaaaaccctgtgatatctggtgaacagattgtccagcaataatattatgtggaactgctataatgtgtcattgattttctacaaatagacttcgactttttaaattgacttttgaattgacaatctgaaagagtcttcaatgatatgcttgcaaaaatatatttttatgagctggtactgacagttacatcataaataactaaaacgctttgcttttaatgttaaagttgtgccttcacattaaataaaacatatggtctgtgtaaaaaaaaaaaaaaaaaaaaaaaaaaaaaaaaaaaaaaaaaaaaaaaaaaaaaaaaaaaaaaaaaaaaaaaaaaaaaaaaaaaa

SEQ ID NO: 1707 - protein, 520 aa, Homo sapien
MGPQRRLSPAGAALLWGFLLQLTAAQEAILHASGNGTTKDYCMLYNPYWTALPSTLENATSISLMNLTSTPLCNLSDIPPVGIKSKAVVVPWGSCHFLEKARIAQKGGAEAMLVVNNSVLFPPSGNRSEFPDVKILIAFISYKDFRDMNQTLGDNITVKMYSPSWPNFDYTMVVIFVIAVFTVALGGYWSGLVELENLKAVTTEDREMRKKKEEYLTFSPLTVVIFVVICCVMMVLLYFFYKWLVYVMIAIFCIASAMSLYNCLAALIHKIPYGQCTIACRGKNMEVRLIFLSGLCIAVAVVWAVFRNEDRWAWILQDILGIAFCLNLIKTLKLPNFKSCVILLGLLLLYDVFFVFITPFITKNGESIMVELAAGPFGNNEKLPVVIRVPKLIYFSVMSVCLMPVSILGFGDIIVPGLLIAYCRRFDVQTGSSYIYYVSSTVAYAIGMILTFVVLVLMKKGQPALLYLVPCTLITASVVAWRRKEMKKFWKGNSYQMMDHLDCATNEENPVISGEQIVQQ

SEQ ID NO: 1708 - DNA, 8982 bp, Homo sapien
gaattcggcacgagtcatggcggcgggagcgcggcttcccaggcccgccgctccgcagggctgctggcgttgctgctgttgagaggcggcggcggcggcgcaggcgggcgggaaggatggtgtttctgcgactggagcggcaggtgcggaccgggagccggaccgaggtttggcagaagcaacgtgtgctcgggagcaaccggcgcgggtgccactgaggcagcggagggaggcaggatcgactgacgggcgaacggacggacggacggaaggcgactcgagggccggccccggagccgcgccgtgggcgagatgccggggccgccggcgttgcggcggaggctgctgctgctgctgctggtcctcctgatcgccggcagtgctggggccgcgccacttccgcaaacaggtgcaggggaggcgccacctgctgcagaagtttcctcatcttttgtgatcctgtgtgtgtgcagtttaataatattaatagtgttaattgcaaactgtgtatcctgctgtaaggacccagaaatagactttaaggaatttgaagataattttgatgatgagatagatttcacaccaccagcagaagacactccctctgttcagtccccagcagaggtcttcacactttcagtaccaaatatttcactcccagctccctcgcaattccagccttctgtagagggattgaagtctcaagttgcccgccacagtctaaactacatacaggaaattggaaatggctggtttggaaaggttctcttgggagagatttacacgggcactagcgtagcaagagtcatcgtgaaggagttaaaagcaagtgccaacccaaaggaacaagatacttttttgaaaaatggagaaccttactacattcttcagcatccaaatattcttcagtgtgttggacagtgcgtagaagcgattccctacctcctggtgtttgagttctgtgacttgggtgacctgaaggcgtatctgcgcagcgagcaggagcacatgcggggggactcacagaccatgctgctgcagaggatggcgtgcgaggtcgccgcggggctggccgccatgcacaagctgcacttcctgcacagtgatttagccctgcggaattgttttctcacctccgacttaaatgtgaaagtgggagattacggaataggattcagcaggtacaaggaggattatattgaaacagatgataaaaaagttttccctctgcgatggactgctccagaattagtaaccagctttcaagacagactgctaactgcagatcagactaagtatagtaatatctggtctctgggtgtgacactttgggagctttttgacaatgccgcacagccgtattcaaacctttccaacttagatgtcctcaaccaagtcattagagagagagacacaaaactcccgaagccccagctggagcagccctactctgatagatggtatgaagtcttacagttctgttggctgtcaccagaaaagagacccgcggctgaagatgtgcacaggctgctgacttacctgcggctgcagagccagcgggactcagaggtcgactttgaacagcagtggaacgctctgaagccgaacacaaacagcagagactcctccaacaatgctgcattcccaattctcgaccactttgccagggaccggctgggtcgtgaaatggaggaagtcctcaccgtgaccgaaaccagccagggcctgagcttcgagtatgtctgggaggccgctaagcacgaccactttgacgagcgcagccggggccacctggacgaaggcttgtcctacacgagcatcttctatccggttgaagtttttgagagttcgctttcagatcctgggcccggaaagcaagatgacagcggccaggatgtccccctgagggtccctggagtggttcctgtttttgatgcccacaacctttctgttggaagcgactattatatccagttagaagaaaaaagtggtagtaacttggagcttgattacccaccagcgctgctcacaaccgacatggataatccagaaaggactggccctgaactgtcccagctcacggcgctcaggagcgttgaacttgaggagtccagtacagatgaggacttcttccaaagcagtacagaccccaaagactctagcttaccaggggacttacacgtgaccagtggccccgagagccctttcaacaatatatttaatgatgtggacaaatcggaagatttgcccagtcaccaaaaaatattcgacttaatggaattaaacggagttcaagccgactttaaacctgccactttaagttccagtttggataaccccaaagagtcagtcataacaggccactttgagaaagaaaagccccgtaagatttttgacagtgagcctctctgcctatcagataatcttatgcaccaagataattttgatccattgaatgttcaagaattgtcagaaaactttttatttcttcaagagaaaaacttactaaaaggctcattgtccagcaaagaacacataaatgatcttcagacagaacttaagaatgctggttttactgaagctatgttagaaacgtcatgtagaaactctttagatactgagcttcagtttgctgaaaataagccaggcttgtctttgttgcaggaaaacgtaagcacaaagggtgacgatacagatgtcatgctcacaggtgacactttgagcacctcattgcagtcttccccggaagtgcaggtacctcctacctccttcgaaacagaagaaacgccccgtcgggtacccccagactcactcccaacacagggagaaacccagcccacgtgtttagatgttattgtcccggaggactgtctccaccaggacatcagtccagacgctgtgactgtcccggttgaaattctctcaactgatgccagaacccacagcctggataacaggtcccaggactctcctggcgagagtgaggagaccctgcgactcaccgaaagtgactctgttcttgctgatgacatccttgccagcagggtgagtgtagggagtagtctcccggaactgggacaggaattgcacaataaaccattttcggaagaccatcacagtcatcgccggctagagaaaaacttagaggctgtggagactttaaatcagctcaattctaaagacgcagcaaaagaagcaggcttggtgtctgccctctcctcggactcaaccagtcaggacagcctcctggaggacagcttgtcagcacccttcccagcctctgagccgtccctggaaaccccggactctctggagtcagtggatgtccacgaagcgctactggactctttaggatctcacactccccagaaactagtgccccccgataagccggcagacagtggctacgaaacagagaacttggagtctcccgagtggaccttgcatcccgctcccgagggcaccgcagactcagaaccagccaccacgggcgatggcggccacagcggtctgcctcccaacccggtcattgtcatctcagatgccggcgatggtcacagaggcacagaagtgacccctgagacgttcacagctggctcccagggttcataccgagactctgcgtacttctcagacaatgactctgagcccgagaaaaggtctgaggaggtcccgggaacctccccatccgccttggtgttggtacaggagcagcccctacccgagccagtcctccccgagcaaagtcctgctgcccaggatagctgcctggaagccagaaagagccagccagatgaaagttgtctgtctgctttgcacaactccagtgacctggaattaagagccacgccggagccagcacagactggtgttccccagcaggtgcatcccacggaagacgaggccagcagtccctggagtgtgctgaatgcagaacttagcagcggcgatgacttcgagacacaggacgatcgcccctgcaccctcgcttccacggggaccaacacgaacgaactccttgcctacaccaattctgcgctggacaagtccctgtccagccactccgagggcccgaagttgaaggagccggacatcgaagggaagtacctggggaaactcggggtgtcagggatgctcgacctctcagaggacgggatggatgcagacgaggaggacgaaaacagcgacgactcggacgaggacctgcgggccttcaacctgcatagcctcagctccgagtcggaggacgagaccgagcaccccgtgcccatcatcctcagcaacgaggacggaaggcacctgcggagtctgttgaagcccacagcggccaatgcccccgacccactgcccgaggactggaagaaggaaaagaaggcagtcacgtttttcgatgatgtcacagtctacctgtttgaccaggagaccccaaccaaagagctggggccctgtggaggagaggcgtgcggcccggacctgagcggcccagccccagcctcaggctctccctacctgagcaggtgcatcaactccgaaagctccaccgacgaagaaggtggtggctttgagtgggatgatgacttctccccagatccttttatgtcaaagacaacaagtaacctgctcagctccaagccttctctccaaacatccaagtacttttctccgccgccaccggcccggagcacggagcagagctggccgcactcggcgccttactcccggttctccatctctcccgccaacattgccagcttttccctcacacacctgaccgactcggacatcgagcagggcggaagcagcgaagacggagaaaaggactaggtggctgccaacgcgcacgctcgggtccgaggctgctcccctggagcggcgcccctgcgccctcagcccgagcagcgacatccactcgccatttgctgacatgagattgggaggaagaatccagaggtgaagagggagacggctcttagctgcgttcaaggcggggccctcgggagcccaggtgcagagcgaggccgtgtccaggagccggcgtccctcagtgccccgtgcacccgcggccgcggcctcccaggcagtgctcatgcgctggccgtcgggggaggcaggggcacagcctccatgtgcgcgcgcgtgtggagctgtgtgcaccgcatgtgtgctttccacaggggcgtctctgcgtccacgcctgcacatcccggcgcacgtgtgggcaccacagaggacacgtgaggggaatggtcaccagtgagccatatttattatttctagagaaatcacgaactgctttctgtaattgcactgtggataaatgttccgagagtctccattgttgtacaggatcttcagttattcgaggggaatgaggcaggtcaagccgatgctagccactagtttgattttttttctgttttatagtttgcgctgcatggtacttgtgaagcttaaatattttgagtgttctactgtgtctaggattgttgggattgtacatatggtactctttcataaatgataaatgattctgaatgttagtgttttatgttcatataggaaatattttcattgagtccaaaataccactgttttgttgatggacttgaatgcatttttgtctcttcttgatgaagcggctttgccgcagcaaatgaggcttctctctgaggagctgagaggtcttgcagcctctccttgtcattctcccaccccacatcccattttttaaagcccttttggtaaaaaccaacaggttgtggccgcagacctcagatggacccggcccatccctggggacgtgctggcgtggcaggtccagagagctgcaccctgcacggggcaccgcaccgcttccctccgcgcagctcttctgcctggttttcggaggccaggctgctgggaggcttccgtgttcctgtcagtccttccttcaagaagccggggaactcaggcagactcatctccgcagagcataccagccgtgggggaccgttcgacttgatgatgtgtgcacacttcaggtggtggggacttgagctttaaaaaaacctccacagccgaatcttctcctccgagccactccacgtcacgtccagctgggcctggccagtctgtggttatccatgtgggatgagataacaccacatcctgcagctgtgaagggggatggacaagggacgacggccgacggcagagcatcagcagccgacacatagttcgggtcggggccttgggtggtcctgcatggcccgggactcatctcacggaccctccgttctgcattaagccccaggttctcttctggctttgaaagggcccgagtgctcccagtgtagcttcgtcacatcgtcacgagcccctgtggtcatgggcgacctcacacctccctccctgagttctgctctgacataaggaagtcctcggtggctggtgcagcgcggctgtgctgtgctggggaggcagccgttccttcgggggtccttgggcctgcagtcccctcatactcacccttcacccaacatattttccggtgctgatatgtttccagactccagcgcaacctggggtgctctccagacccgtgcaggggccgcctggggtacacggaaggaagttgagtcctagtgcaaaatgcaggcggacgttgccagagagtgcgcagcaaatgaccttcattgccagttccaccctactcctctcattttttatactaagcaataactttccaaagcaagaagttcaggatggagagagtcccctcctgtgtaggcatggggtggacgcggtgcccacctgggctatgtggggagcaccactgtctcgggatgcgcgaatttttttttttttttaattaacagggcattagaagatgattttgccaaaattgtcatgactctgaattcttgctgtggggacttcctgagttttctcagtttttacatctaagattagtcttggctgaagagaaatgagacgtgattatactactttttcaattgcaggtttaaggagttcagatttaatgaccaaagtcatacagatcatggaatctgtcgtcgtcttatacagtgtcagcctcgagtacatttattaaccttttggggctgtcagttttccactaggattaagattttggccgggcgcggtggctcacgcctgcaatcccaacacattggggggtcgaggcggacggatcactttgagcccaggagttcaagaccagcctgggcaacatggcgaaacctcgtctctactaaaaatacaaaatatatatatatatatatactagctggggcacatagtggtgtgcacctgtagtcccagctgcttgggaggctgaggtgggaggatggctagagcccaggagatgggtgttgcagtgagctgagaccatgccactgtactctagcctgggtaacagccagaccctgtctcaaaaaaaaaacaatttttttcataacataattcccatttttatttattttgagtcactcataattaattgccaaaaaagcattttatacattgagttggggggtagtggatcttagtgtggtgttgcatggaggggcgagattttatatttataatcaacacgtgggttaacatgtttttttgaaatccaagcaatacacaggaaatttaagtagaataaaaattgcagcccatttttgaaatgtcagcatgtgctgtgttcagttcaggtttttgttgtttgttttgttattttttaactaataagttggttatcagtggtgggttttcaaaatgtacttgttctaataagttgtacaatgaactaaatcagtggcattctctagataatgtgggggaaggttagaatattttctggccttctatggggtagcaacccagaatcaatctgaattagtcctgttttggtggagtttgtacattttaaatcctataacaaaaataatctagttttcatttccttactagctagatgcgaatttgtctttttgaatgaccctgtcaataagccagaaagggcaacccagaaaaagtgctccccacatccttctgagacttggcctgtgtgtgtggacgagaagccattcaccgtaagggtgcagaaagctcgaccaagccgaattgcaaacaacgttcgttctatttttaaatgtacaggttcgatcgtttctatagaaatgggtttatctaagaaaagtcttggtttgtcttgctgctgtaaaaggcctttccaaacccctccttttattcctgtttcccgaaataaggtatttgtagagttaaggacctactgcatgcctgtccccagggccccggtggaaggaaggcagcgcctgctcttccttgactcagcccatcatctgaaaattcagaagtgaaccaagggttagacgccagaggttgggcttctgttagagtggcttcaaaacatgagccttatgggaagtagccttaaaaaaagaatgggtatacgcagtgacttccgatggaaatctccaaaacaatattcctaagtagcaatggggttggctcaagtctttattaacaaagaacattctctttcatctataaagaaattcttaaagatgcattgacagtgttgaattaccaacagcctgtgaagatcagtttgaccggtgtggacacgtgctggttaagcactcaggcctacgtgggccgagcgggatcttgatcatggggctggtgtatggatccaccgtcggattccgtctgcagaggaggacgtagggggccgtcacacccaccaggcctccctgctgtgctttaacacaggcagaagaggttcatggcaatataatagtcaatgaactttcagtttaaattgtgtacatttttaaattgtaagatttttactgtatattgatgcatagtgtgattcaataaattgcttgtaatttaaaaactatttaatattcaaaataaatatagttatatatttataaaaaaaaaaaaaaaaaactcgag

SEQ ID NO: 1709 - protein, 1503 aa, Homo sapien
MPGPPALRRRLLLLLLVLLIAGSAGAAPLPQTGAGEAPPAAEVSSSFVILCVCSLIILIVLIANCVSCCKDPEIDFKEFEDNFDDEIDFTPPAEDTPSVQSPAEVFTLSVPNISLPAPSQFQPSVEGLKSQVARHSLNYIQEIGNGWFGKVLLGEIYTGTSVARVIVKELKASANPKEQDTFLKNGEPYYILQHPNILQCVGQCVEAIPYLLVFEFCDLGDLKAYLRSEQEHMRGDSQTMLLQRMACEVAAGLAAMHKLHFLHSDLALRNCFLTSDLNVKVGDYGIGFSRYKEDYIETDDKKVFPLRWTAPELVTSFQDRLLTADQTKYSNIWSLGVTLWELFDNAAQPYSNLSNLDVLNQVIRERDTKLPKPQLEQPYSDRWYEVLQFCWLSPEKRPAAEDVHRLLTYLRLQSQRDSEVDFEQQWNALKPNTNSRDSSNNAAFPILDHFARDRLGREMEEVLTVTETSQGLSFEYVWEAAKHDHFDERSRGHLDEGLSYTSIFYPVEVFESSLSDPGPGKQDDSGQDVPLRVPGVVPVFDAHNLSVGSDYYIQLEEKSGSNLELDYPPALLTTDMDNPERTGPELSQLTALRSVELEESSTDEDFFQSSTDPKDSSLPGDLHVTSGPESPFNNIFNDVDKSEDLPSHQKIFDLMELNGVQADFKPATLSSSLDNPKESVITGHFEKEKPRKIFDSEPLCLSDNLMHQDNFDPLNVQELSENFLFLQEKNLLKGSLSSKEHINDLQTELKNAGFTEAMLETSCRNSLDTELQFAENKPGLSLLQENVSTKGDDTDVMLTGDTLSTSLQSSPEVQVPPTSFETEETPRRVPPDSLPTQGETQPTCLDVIVPEDCLHQDISPDAVTVPVEILSTDARTHSLDNRSQDSPGESEETLRLTESDSVLADDILASRVSVGSSLPELGQELHNKPFSEDHHSHRRLEKNLEAVETLNQLNSKDAAKEAGLVSALSSDSTSQDSLLEDSLSAPFPASEPSLETPDSLESVDVHEALLDSLGSHTPQKLVPPDKPADSGYETENLESPEWTLHPAPEGTADSEPATTGDGGHSGLPPNPVIVISDAGDGHRGTEVTPETFTAGSQGSYRDSAYFSDNDSEPEKRSEEVPGTSPSALVLVQEQPLPEPVLPEQSPAAQDSCLEARKSQPDESCLSALHNSSDLELRATPEPAQTGVPQQVHPTEDEASSPWSVLNAELSSGDDFETQDDRPCTLASTGTNTNELLAYTNSALDKSLSSHSEGPKLKEPDIEGKYLGKLGVSGMLDLSEDGMDADEEDENSDDSDEDLRAFNLHSLSSESEDETEHPVPIILSNEDGRHLRSLLKPTAANAPDPLPEDWKKEKKAVTFFDDVTVYLFDQETPTKELGPCGGEACGPDLSGPAPASGSPYLSRCINSESSTDEEGGGFEWDDDFSPDPFMSKTTSNLLSSKPSLQTSKYFSPPPPARSTEQSWPHSAPYSRFSISPANIASFSLTHLTDSDIEQGGSSEDGEKD

SEQ ID NO: 1710 - DNA, 774 bp, Homo sapien
cccacccgcgacgccgacgcaaggctgctgctatggggccgggcggccgtgtggcgcggctgctcgccccactaatgtggcgcagggcggtttcctcggtggcggggtccgcggttggagccgagcccgggcttcggctgctggccgtgcagcggcttcccgtaggagcagcgttctgccgggcttgccagaccccaaactttgtccgcggcctgcacagcgagcctgggctggaggagcgggcggaggggacggtcaacgagggacgcccagaatcggacgcggcagatcatactggtcccaagtttgacatcgatatgatggtttcacttctgaggcaagaaaatgcaagagacatttgtgtgatccaggttcctccagaaatgagatatacagattactttgtgattgttagtggaacttctacccgacacttacatgccatggccttctacgttgtgaaaatgtacaaacacctgaaatgtaaacgtgaccctcatgttaagatagaagggaaggacactgatgactggctgtgcgtggattttggcagcatggtgattcatttgatgcttccagaaaccagagaaatctatgaattagagaaattatggaccctacgttcttatgatgaccagttagctcagatagcacctgagacagtacctgaagacttcattcttggaatagaagatgatacttcatctgtgactccagtggagttaaaatgtgaataaaatattttatgcactgcgaaaaaaaaaaaaaaaaaaa

SEQ ID NO: 1711 - protein, 234 aa, Homo sapien
MGPGGRVARLLAPLMWRRAVSSVAGSAVGAEPGLRLLAVQRLPVGAAFCRACQTPNFVRGLHSEPGLEERAEGTVNEGRPESDAADHTGPKFDIDMMVSLLRQENARDICVIQVPPEMRYTDYFVIVSGTSTRHLHAMAFYVVKMYKHLKCKRDPHVKIEGKDTDDWLCVDFGSMVIHLMLPETREIYELEKLWTLRSYDDQLAQIAPETVPEDFILGIEDDTSSVTPVELKCE

SEQ ID NO: 1712 - DNA, 609 bp, Homo sapien
gggccgcgactgtggtcgtttttataccttcccgcgcggacgccggcgctgccaacggaagggcgggtagggcgagacggagtttcgtcatgttggccaggcccatttgagatctttgaagatatcctcaacgtgaggctctgctgccatgaaggtgaagattaagtgctggaacggcgtggccacttggctctgggtggccaacgatgagaactgtggcatctgcaggatggcatttaacggatgctgccctgactgcaaggtgcccggcgacgactgcccgctggtgtggggccagtgctcccactgcttccacatgcattgcatcctcaagtggctgcacgcacagcaggtgcagcagcactgccccatgtgccgccaggaatggaagttcaaggagtgaggcccgacctggctctcgctggaggggcatcctgagactccttcctcatgctggcgccgatggctgctggggacagcgcccctgagctgcaacaaggtggaaacaagggctggagctgcgtttgttttgccatcactatgttgacacttttatccaataagtgaaaactcattaaactactcaaatcttaaaaaaaaaaaaaaaaa

SEQ ID NO: 1713 - protein, 132 aa, Homo sapien
MKVKIKCWNGVATWLWVANDENCGICRMAFNGCCPDCKVPGDDCPLVWGQCSHCFHMHCILKWLHAPAGAAALPHVPPGMEVQGVRPTWLSLEGHPETPSSCWRRWLLGTAPLSCNKVETRAGAAFVLPSLC

SEQ ID NO: 1714 - DNA, 1999 bp, Homo sapien
gtttacatccgccgggtgcgcggttcgccgcccgaggtcgttcggctcgggtaccatcctccgcgccatggacaccagcgacctgttcgccagctgcaggaagggggatgtgggccgagtgcgaccatgaacccgtcctgacccaggctctgacctccttcctgcccaggtacctgctggagcagcgagacgtggaggtactatgcctgcttgtgtgggcacgaggagctggtactctaccttctggccaatggagcccgctgcgaggccaacaccttcgatggtgagcgctgcctctatggggcactgagtgaccccatccgccgggctctacgcgattacaagcaggtcacggcttcctgcaggaggcgggattactatgacgacttcttgcagcggcttctagagcagggcatccacagtgacgtggtctttgtagtacacgggaagccattccgggtgcatcgctgcgtcctgggtgcacgtagtgcctactttgccaacatgctggacaccaaatggaagggcaagagtgtcgtggttctcaggcacccactgatcaaccccgtggcctttggggccctgctgcagtacctgtacacaggccgcctggacattggcgtagagcatgtgagtgactgtgagcgcctggccaagcaatgccagctgtgggacctgctcagcgacctggaggccaagtgcgagaaggtgtctgagtttgtggcgtctaagccaggcacgtgtgtgaaggtgctgaccatcgagcccccacctgcagacccccgcctccgggaggacatggcgctgctggccgattgtgccctgccccccgagctccgaggtgatctttgggagctgcccttcccttgtcctgacggcttcaacagctgccctgacatctgcttccgagtggctggctgcagcttcctctgccacaaggcctttttctgtggccgcagtgactacttccgagccctgctggatgaccacttccgagagagcgaggagccagcgacctcagggggccccccagccgtcaccctgcatggcatctcacccgacgtcttcactcacgtgctctactacatgtacagcgaccacactgagctgtcccccgaggcagcctatgatgtgctgagcgtcgccgacatgtacctgctgccaggcctgaagaggctgtgcggccgcagcctggctcagatgctagacgaggacactgtggtgggtgtgtggcgcgtggccaagctcttccgcctggcgcggcttgaggaccagtgcactgagtacatggccaaggtcattgagaagctggtggagcgggaggacttcgtggaggcggtgaaggaggaggcagcggctgtggcagcccggcaggagacggactctatcccgctggtggacgacatccgcttccacgtggccagcacggtgcagacctacagcgccatagaggaggcgcagcagcgtctgcgggcactcgaggacctgctcgtgtccatcggtctggactgttgagcccctggctgggcagccccaggggccaggagctctcttggagacaagcatgtgtatgcgtttgtgtgcagctcttcttcctgctccctgcacattgagggcttcatggggggtgcgaggggctcagtggggcttctcttccctccatgagcctggagaccccaggggaggatccatttgggatgagccccctccccccaatgcacaagccagcccccaagaccctgggggtggacaccactcagggaaacctggggtgggggtgggctttggtcttagcactttccttctccagatcccccctacccaccccagtcccaaatccagtcctctggcccttgcctagccctgaattgcttctctaagctggtgttcccatgcacagggccattcaggaagggctgggggagtgtgtgtggcaataaagcttgaaggcaccgtgggaaaaaaaaaaaaaaaaaaaaaaaaaaaaaaaaaaaaaaaa

SEQ ID NO: 1715 - protein, 336 aa, Homo sapien
MLDTKWKGKSVVVLRHPLINPVAFGALLQYLYTGRLDIGVEHVSDCERLAKQCQLWDLLSDLEAKCEKVSEFVASKPGTCVKVLTIEPPPADPRLREDMALLADCALPPELRGDLWELPFPCPDGFNSCPDICFRVAGCSFLCHKAFFCGRSDYFRALLDDHFRESEEPATSGGPPAVTLHGISPDVFTHVLYYMYSDHTELSPEAAYDVLSVADMYLLPGLKRLCGRSLAQMLDEDTVVGVWRVAKLFRLARLEDQCTEYMAKVIEKLVEREDFVEAVKEEAAAVAARQETDSIPLVDDIRFHVASTVQTYSAIEEAQQRLRALEDLLVSIGLDC

SEQ ID NO: 1716 - DNA, 1525 bp, Homo sapien
  Unsure 400-435: Unknown base
aatttttagcaaaacatcctgtttttacttaaaattcttctcatatttattatagttagaaggtaaagatcaagatgacctgccgtttgactgcttttacatcaaactctgcccagtatttgcagcacaactcaggggaagggccttagcttacaggtactcccagccttcatctgcccctgcagagcagtggctgtcagccggatgcggcacttttctgtattttcatccacacagctgcccagccagagttcgcaacactggatatttacaccaaataattgtggttgacttgtctgaagccagctgacaaaaggatcagcttttcccacttgtattttttaaaaagagggattgtgatcattgtcacagagtgggtgctggcctctcatatatatgnnnnnnnnnnnnnnnnnnnnnnnnnnnnnnnnnnnncatatacataatttttactgctgtctctagttttaagtcccaacaataggaaggccgatcagctatattgatatatttaaggctgtacttaactaatttgggctgaggatgaatatatcagccacagcacattaaagaatgagccaaggatttgtcatggttggtcactttttaaagtatttgattactgcaactggagaatgaaaagtgtatattggtgacgccaacctcagtttctgagcactcctgctctgtggtgagaatcagacaaaaattcatcggggtgaaaaaaaaaaggcattacctgattcacacccttgtcttgctagccctcttccattcatttctcacacagcactttgctctgttaaatcctctgtctcagaccattgcttgccccttcaaagggtatggttcaggctcctttcaagacatttggagtttctctctggggaaagagagccccctactggtttggcttcagtctaggtccaccatccctctcgatctggcatcttggagattaatttaaaaggcaagctcaccacaatgtaagcctatggtctggccaaccttgcttttgggaactgtgacaccaaagcccccaggactatctgcctctccaggagccagatagaatgacatgcctttttcctaattgtccacattccacccccaacccactgccactgtgggccaagccatccatcttgcaatcttcatctaaaacagctctcatttcatgccagttttgctcaaacctgcaccgtcacaagatattcagaagatgaaaacgtagaagacacccctgaattaaaaacacttacatagcagtggctggaattactccaaaacgtgcccagtgatcgcactgtaacatgggattttctcacccaaataggcaactcatgcttcctgagtgtaatcaaagcatgtggtgttttggggccatatgcaccaggtttctattttagaaaccttcagctgtcttgcttatgtaccgtatgtaaatttattctttttaaaaatcacttttatttgattttgacttattaaatgctttaaaagccagaaaaaaaaaagtgatttt

SEQ ID NO: 1717 - protein, 17 aa, Homo sapien
IFSKTSCFYLKFFSYLL

SEQ ID NO: 1718 - DNA, 1515 bp, Homo sapien
tgcggccgctgccttggacccagcgccacccgcacacggcgctccgctagccaggccgggagcaagagccaggcggtggagaagccgccgtcggagaagccgcggctgaggcgctcgtcgcgccgggccccaggaggagggccgggggagccgccgccgcctgagctggcgttgctcccgccaccgccgccgccgccgccgactcccgcgaccccgacgtcctcggcgtccaacctggacctgggcgagcagcgggacgcctgggagacgttccagaagcggcagaagcttacctccgagggtgccgccaagctcctgctagacacctttgaataccagggcctggtgaagcacacaggaggctgccactgtggagcagttcgttttgaagtttgggcctcagcagacttgcatatatttgactgcaattgcagcatttgcaagaagaagcagaatagacacttcattgttccagcttctcgcttcaagctcctgaagggagctgagcacataacgacttacacgttcaatactcacaaagcccagcataccttctgtaagagatgtggcgttcagagcttctatactccacgatcaaaccccggaggcttcggaattgccccccactgcctggatgagggcactgtgcggagtatggtcactgaggaattcaatggcagcgattgggagaaggccatgaaagagcacaagaccatcaagaacatgtctaaagagtgagcttctgcctctcctgccctgaaaaggaggaatgattggggccagcaactttgctctccctgccgtgcctcggtggtgctcctgaatgtggctgacctgggctgctggttccgttgactagggtcatcttgatctctgcagtttgctccagctaccagtttctttaggcagctctttgtcctccctctgcccagattttgatgtagtctaattgacatccttctcttcccaacttttgtgtgatccagcagagcatgtgagactctttgatatgcaccttcatgtattatcttgttcagttctctgaggttgggatcattattatttcccattttgcagatgagagaattgaggcagagaaaggttcagcaccttgcctttggttacacagctggtcattctggcttcaatcgcaggactaccagcctgtgctcttcaccacttagcttccctgactcaggccacttccctggagcgttagctggattctgagagtagtttccaagccagagctttcagagagcttttgttcgtaggacaattttaagacatcaggttcttgaatgttttgtgtttttttaagtctcagatttatcttcctacttcctacttctccaaaaagactgagagctgacatatttgattgtaagctctttgaggcagagttcttgtaatcgtctctgtataaaacagtgcccaccccagtgacctgtacttggatgcttcaatcagagctgtcctgttaaatagagcaagtttttcctagacccacattct

SEQ ID NO: 1719 - protein, 245 aa, Homo sapien
CGRCLGPSATRTRRSASQAGSKSQAVEKPPSEKPRLRRSSRRAPGGGPGEPPPPELALLPPPPPPPPTPATPTSSASNLDLGEQRDAWETFQKRQKLTSEGAAKLLLDTFEYQGLVKHTGGCHCGAVRFEVWASADLHIFDCNCSICKKKQNRHFIVPASRFKLLKGAEHITTYTFNTHKAQHTFCKRCGVQSFYTPRSNPGGFGIAPHCLDEGTVRSMVTEEFNGSDWEKAMKEHKTIKNMSKE

SEQ ID NO: 1720 - DNA, 7525 bp, Homo sapien
cccgggcgagcccgccgtgcgcacagctctgcccgccgcccctggagcggatccccagccgtccctgggcgttctcccgggttctagcaaagccccccggggtgcccatcagtttccttgggtgactacagcgtgtgttttttctttcctctttcccctgcctgtgtgcccttctccaggatggcagaggcggaattgcacaaggaaaggctgcaagccatagcagaaaaaagaaagaggcagactgaaatagaaggcaagcgacaacagcttgacgagcagatacttctgctgcagcattccaagtccaaagtgcttcgggagaaatggctgctgcagggcatacccgctggaactgccgaagaggaggaagccaggaggcggcagtctgaagaggatgagttcagagtcaagcaacttgaagataacattcagaggctggagcaagaaatacaaacgctagaaagtgaagagtcccagatatctgccaaagagcaaatcatcctagagaaactgaaggaaacagaaaaatccttcaaggactttcagaagggtttctccagtacggatggagatgcagtaaattacatttcctcccagcttcccgacctgccaatcctctgttcacgaacagcagaaccatcacctgggcaggacgggaccagcagagcggctggagtcgggtgggagaatgtgctgctaaaggaaggtgagtcagcctcgaacgccacagaaacatccggcccagacatgactatcaagaagcctccccagctttctgaggatgatatctggctaaaaagcgagggagacaactatagtgccaccctcctggagcctgctgccagctctctttccccagatcacaaaaacatggaaattgaggtgtctgttgcagaatgtaaaagtgttcctggaatcacctctaccccacatcccatggaccatccctccgctttctattcacccccgcataatggcctccttactgatcaccacgaatccctggataatgatgttgccagagagatccgctatctagatgaggtgctagaggccaactgctgtgattctgctgtggatggaacgtacaatggaacatcctccccagagcctggtgcagtggttctggtgggcggcctaagcccccctgtccacgaggcgacccagccagaacccactgaaagaacagctagccggcaggcacctcctcacatcgagctcagtaatagcagccctgaccccatggcagaggcagaaagaacaaatggccattcccccagccagcctagagatgcgctgggggacagcctgcaggtgcctgtcagccccagctccacaaccagctcacggtgttcttcccgagatggagagttcactctcaccacactgaaaaaggaggccaagtttgagctgcgtgccttccatgaggacaagaagccctccaagctctttgaggatgacgagcatgagaaagaacaatactgcattagaaaagtgaggccttcagaggagatgctggagctggaaaaggagaggagagagctcatccgcagccaggccgtcaagaagaatcctggcattgcagcaaaatggtggaatcccccgcaggaaaaaaccatcgaggagcagctggacgaggaacatctggagtcgcacaaaaagtacaaggagcgcaaagagagaagggcacagcaggaacagttgctgctgcagaagcagttacagcagcagcagcagcagcccccatcgcagctctgcacagcccctgcctcttctcatgaacgcgcaagcatgattgacaaagcaaaggaggacattgtcacagagcagatagatttctctgctgctcgcaaacaatttcagctgatggagaattccaggcaagcggtggccaagggccagagtacacccaggctgttctccatcaagcctttctacaggcctctggggtcagtcaactcagacaagccactgactaatccgagaccaccttctgtcgggggacctccagaagacagtggtgcctcagccgccaagggacagaaatcccccggtgccctggagaccccatcggcagcaggaagccagggcaacacagcctctcaggggaaggaagggccctacagcgagccttctaaacgtgggcccttatctaaactgtgggctgaggatggagaatttacgagcgcccgggctgtcctcactgtggtcaaggatgatgaccatgggattttggatcagttctcaagatctgtcaatgtctccttgacccaagaggagcttgactctggtctggacgaattgtcggtgaggtctcaggataccacagtcctggagaccctatccaatgatttcagcatggacaacatcagtgacagcggggcatccaatgagacaaccaatgccctccaggaaaattcactggctgatttttctctgccccagacaccacaaactgacaacccctcagagggccgaggagaaggcgtctccaagtcatttagtgatcatggtttctattccccttcctccacgctgggggactctccgttggttgatgaccccttggagtatcaggctggcctcctggtgcagaatgccattcaacaagccatagccgagcaggtggataaagctgtgtccaaaaccagcagggatggagcagagcaacagggacctgaagcgactgtagaggaagctgaagctgcggctttcggctcagaaaagcctcagagcatgtttgagccacctcaggtgtcttctcctgttcaagagaaaagggatgtattaccaaagattctgcctgctgaagacagggcgctcagggaaagggggcccccccagccactgccagctgtgcagcccagtggcccgattaacatggaggagaccaggcccgaaggaagctatttcagcaagtactcggaggcagctgagctgagaagcacagcctccctcctggccactcaagaatctgacgtgatggttgggcctttcaagctgaggtccaggaaacagcggactttgtccatgattgaggaagagatccgagcagctcaggaaagggaagaggagctgaagaggcagagacaagtcttgcagagtacgcagagccccaggacaaagaatgccccatcactgccctccagaacatgctacaaaactgctccagggaaaatagagaaagtcaaacctcctccatcccccaccactgaaggccccagcctgcagcctgacttagcccctgaagaggctgccggaacccagcggcccaagaatctgatgcagaccctcatggaagactatgagacacacaaatctaaaaggcgcgagagaatggatgatagtagttacacttctaagttactgtcttgcaaggtgacttccgaggtcctcgaggccacacgggttaatcgaagaaagagcgcactggctttgcgctgggaagcagggatctatgccaaccaggaggaagaagacaacgaataaacttccttcaacccaggaagcgtctttggtgcttgggagaccaagaaaccaagaaattaacaactgaaagcattttaatggactatttattaaagtgcaaacaaactcagcaatccttatgtagaccagaagctgcaatatacaatgatgaaaatgaaacgaaaaggaagtccccccatcagactctggacacccaggaatcaaaagagaaaggacttttttggtgactcaatcccagtgtctggtttggggccaatctacaatggatccaaaaggacaaaacatgttacaagcaaatcaacatagttgctgcaggcggaactgagaccagcctctctgggcgatgaaggacaatggtggtagggccacttagagagcagtagggcccaggctggtgcagcctacatggcacaggatatttccctgcaccagtttcccacctgtcacttgcagcatcagagggtgttgcattaactccattttctccagcagccataaaatgaatggcgtttctctccatatttgcccagaagaggcagttatgattccacttctcctacatttaattatttttaattgagaacaactcatgatcacaattcataaaatccatattttaagacaatagttcttcatgtcacaaacacaatctattctacatgaggaggctgagaaaggggaagagaaaaacaaaccaaatggatgatgttagctttaggatcgtgtctgcttataatattcactgatctgcagtttatgagaacacattttcacagttatgtttcttcataggaaaactatatttagtgggcaacaactatttttatgatgggatgggggagtatatacacgtatagaatctgtacgcgttgaacaacttggttcaagatggtgggggcatttttagagcggcaataattgaaaaaaaaggcgaactctgccttggagaggtagatgataagaaataaaaaggtgtttataactattttgtattataaagtgggccttagagataggaagaagaatgatggattccttttggatcaatcagaaaggaaacacgaaagaaaagtcaggaaggtagagagagaaaaagggagggaaggagaaagaatgggaataaaataaggaggtaagagatactatttttgctgagcaaccagtgtgtttcaggatgatacaaagaaaaatatagaatagaaataagtgcaggcttggaatcagctacaaatcctaaagatggggtgtgtgtggatgtgtgtgtgtgtgtgtgtacaccattgtgtgtttgtaaaatgtgtatgttcatgagtaagggtgtgtgtgtgtgtgtattaaaattccagagtgaccgtggcacttgggtgtacaggtaattcctccagagctgtttgctggcttcaggagtggagtgagaatttcttttttatgaaaagggatataaaggcaccgagctgatgcagtatttgtaatattaagttgacctaacaaggtatttgcatgagtcacaattacaaagttttgagcggttttgtaatttgacatttaggaaagtctcctatttattctcatactttacattcatgcttagtatactatagaggatgccagctttaatctttctgtcatttaaagccatatgataagggtattcaataattgggtgccctaaatttctggatgagaaaattttcaattctggccatgagaaagaaaaaaaaataaacagccttctttttttttcctttgttttaaaactgtggttttttaaaaaagcaataattaactcagacctcactaaaaatcatttttgtttttatattgttatgtcataagctctattatgttattctaacaagtagcaatttcacaaaatttgtatgtagatgttaacgcacatttcctttgcttcttttattagactagtgttgactttggggggggacatttattcacaaatgagaagtaggcacaaagtaaaaaatggaaccatctactaacaaggatcctttaaaactgccaagggagctctaacttgaagccacatcctacagatggcagcccaaatagcacatgggcaattggcaccatctttatatggttgagtctcctgaatattttgaatgaattctcaacaaaatgtgctagccactggggacgcaaaacaagtaagatccctgttgcaagaaattcattttatagtgagggaggttggcatggagactaaaattctcaggaaaatgagatccgtgttagattagaagtcctgatgtgaaatgggaggactcaggaaggaggatcgtctttacctgaggatttctagccagaggtcccagatgcctgggctgagaacccagcgataagggggcgttcccaaagcagacacagggataagaacagaggaggcagcagcattgcacagccccaggcacagtggcagttaggatggctggagagtaggatagttctatgggttgcccaaaaaatgtgatgcgcttcatgttttctctgactcatggatctggtagagaccatagacatgatatagactaacttccccatttttcacaatgaaggtaaaccatccttatgacttaccttaaagttttttgttctgttttgaaggaaaccatgtgcttcatgaaacctacagttgacaagagaatgtacagctaagagaaaagcttaagaggccacactattcgcggaatggctttagaggcagatgaagtggtctttgaccacagttgattgaaccagagcacttattgcttaaagaataacagagttctagagctgggggttcttgggccatgctccgtgtgtggataaggaaagaaatactgtttctgggactctcccacagtcacaaagctgttttcactgtggcccctacatctcttaacttttgctattactcctatgctgccttccggattactgctgtctatcttcttgctccactcactgaagatcctattataatcccatgaaaatgtaaattacagtttacttgggagagccagattttctctgtgctcttgagttttttattcattcaagaaaccttgggccaccgctttgtacatagcaccgtgctaggctctgggatcccaaatggacccttttaactttctgaagatgggaccgtcccctggaggaaagtcattcctgcctaatccatcgagagaaagaggcttacgaaaaactttgcctctgatgctcagccccacccccaaatagcacacaagcttgttaaccccacctcttacaaaatgtttagattctgtaggtgttaaaagcctttctggaagtattgcattctgccgtgtttataggtgttcactttcctccagagctgattaactactgacatgacttggctttctcatccagaaattatggaaacagggtctgtcagtggcaggaggccgtgctgtgttttacttggatgacacaatgcagtttacttgcctcttcatacccatgcatgctgctcaccctagacaatgacatataagccgtatatagatcaatgtccacatatatatacacacacacatatatatatataaagtgtaacaaggaacactaaaacagtgttgattcttgtctctgaagacaaataattaaaccttttttttcccaactaaagaatggatttaattaaactatgtattgaaaaaaaagtagcctaagtgttagagatggtgaatatattccattttagttaaagaacaaatttcctgaattttaagcattcagtgagctgccaattttgattttgtgttgctctttacccaaattattttttctttgtttttctttttttgggggaggaggggaaaaaagcagcaatactgtgtttggaaattatactctgtatctggttttcctgtgtatgttaaccacttaaatgttattatcctgctttggttttagagtgattgtgaggcattcaatgcaagtatacagttattttctcattaaaatccaatgtgtgttgagtttttataaaaaaaaaaaaaaaaaa

SEQ ID NO: 1721 - protein, 1103 aa, Homo sapien; identical to SEQ ID NO: 354

SEQ ID NO: 1722 - DNA, 2227 bp, Homo sapien
gctctcgggccgcccctcttcgccgtctccacgcctccgcgggcagttaccagctttggctgctcgcgcctccccaactcgggtaaagctcctcggcctcggcgtgctgcgcctccgcggctgccctgcgccagaattcggttccctcaaaattataaaagcaggaaagctcaagacaaagaaatccaacaaggctagtgatttcagtgatatggagaattggccaacaccaagtgaattagtgaacactggatttcagagcgtcctcagccaaggaaataaaaagccacaaaatagaaaagaaaaagaagagaaggttgaaaagagaagtaacagtgacagcaaagaaaaccgggaaacaaaattaaatggtcctggtgaaaacgtcagtgaggatgaggctcagtcaagtaatcaacgtaagagagctaataagcacaagtgggtaccactccacttagatgttgtaagatcagagagtcaagaaagacctggatcccggaacagctcaagatgtcaacctgaagcaaataaaccaacacataacaataggagaaatgatacacgaagttggaagcgagatagagaaaaaagagatgatcaagatgacgtttccagtgtgagaagtgagggtggtaatatccgaggttcctttagaggtcgaggaagaggccgaggacggggaagaggacgaggcagaggaaatcctcgattgaactttgattattcatatggttatcaagaacatggtgaaaggactgatcaaccatttcaaacagaacttaataccagtatgatgtattactatgatgatggtacaggtgtacaggtgtatcctgtggaagaagcgttgcttaaagagtatattaagcgtcaaattgaatattacttcagtgtagaaaatttggaacgagacttctttcttcggggaaagatggatgaacaaggtttcttgcctatttccctgattgctggttttcagcgtgttcaggctctcactacaaaccttaatctcatcttagaggcactgaaggatagcacagaagtagaaattgtggatgagaaaatgagaaaaaagatagaaccagaaaaatggccaattccaggccctcctccacgcagtgtgccaccaacagacttctctcaactgattgattgtccagagtttgtaccaggccaagccttttgctcacatacagtcagggtgatgatcttctgaagctcttggatgtcatttgatcggaatatgcagtggaataggtgactcactgaaatgcctttataaatactggaacaaatcctgctgcaaaaatgaaagcgatcagactgtcttctgttcaagaatgtctattcccacctcttggtggaggaagttgggccaacactgcagtggagataaccacctttgcgataatgagagacagaccagaggactgctactctttttataggagctgcctatttctgtgtaattggcctgggctgcatgggctgcttttattcatggtgggaaagttaattattattattctggaaataccgcaagattatgttttctgtttccagggttatgtacttgtgtccagatgaataaagcagaaaaagaggggattgagtagcatttcccagattcttaagtactttgctattcgatttgcctttcagtgtagtgtacattgtaaaactcagatattgtcatgatgtttcacttggacataagacttattaatgtggtcacttaaggggtaaggaatttaagaactggatgaggttatttcttcctttactcttcaaaatgtatttttgatacatcagtatgagaggacgtcccatcaacaaagcatcgatgatggacagtctcacactatttttatcatatgtttctttgtcagccttctgcttctaatcccagtaagcaacttggacaggcattttaaaagctgaagaaaagtgacattattttagctagtggtttttaatttattttttgttaagatataatgggtgattatataagttagatttatttatgatatcaacttgggtccaagatgatagttttagctagcttatgaacattgggttcacaaggcattgggtaagttagataaaatagcatatactttctctgcagggtaggtaagataggtcagtcaagttggtaatgcctgtccattaaccatttatgcatactaataaaattataagaataaaatcataatgttgt

SEQ ID NO: 1723 - protein, 405 aa, Homo sapien
LSGRPSSPSPRLRGQLPALAARASPTRVKLLGLGVLRLRGCPAPEFGSLKIIKAGKLKTKKSNKASDFSDMENWPTPSELVNTGFQSVLSQGNKKPQNRKEKEEKVEKRSNSDSKENRETKLNGPGENVSEDEAQSSNQRKRANKHKWVPLHLDVVRSESQERPGSRNSSRCQPEANKPTHNNRRNDTRSWKRDREKRDDQDDVSSVRSEGGNIRGSFRGRGRGRGRGRGRGRGNPRLNFDYSYGYQEHGERTDQPFQTELNTSMMYYYDDGTGVQVYPVEEALLKEYIKRQIEYYFSVENLERDFFLRGKMDEQGFLPISLIAGFQRVQALTTNLNLILEALKDSTEVEIVDEKMRKKIEPEKWPIPGPPPRSVPPTDFSQLIDCPEFVPGQAFCSHTVRVMIF

SEQ ID NO: 1724 - DNA, 5908 bp, Homo sapien
ccagggagaggactgcggccaagagtgcccggtggggacgttttggcgtgaactgctcgagctcactgctcctgtgggggggccacctgccacggggtcacggggcagtgccggtgtccgccggggaggactggggaagactgtgaggcaggtgagtgtcagccgcagccccagttccgcctccccaggctgcacggctccaagctggtggggccctgaactgtgggggccccagccctgcggatcccaggcccgtctatagcaggtgtgagagctcacagtgcactcccctggggtagggagggggggtctgtggctgccccaccaagttcctggggcctccaggctgccctctcgggctgctccctctctgcatgaggctccatctctaacgggctcggctccttgtgttgccagctgaacggtgccgggggctgggggtcctctactgtgggtgcgcaccccgcagcctgcagccccaggaggtgcccgggtcctctcccctccccggggcaggctgagatggtaacagtggttccacctcctcggctgtggctccaggggcatcgtgccatgttatgttgatgtgttgagcaagggcagcttgggcactgactggccatgggggtgggcactagattgtcccgagggccgctgggggctgggctgccaggagatctgcccagcatgccagcacgctgcccgctgcgaccctgagaccggagcctgcctgtgcctccctggcttcgtcggcagccgctgccaggacgtgtgcccagcaggctggtatggtcccagctgccagacaaggtgctcttgtgccaatgatgggcactgccacccagccaccggacactgcagctgtgcccccgggtggaccggctttagctgccagagagcctgtgatactgggcactggggacctgactgcagccacccctgcaactgcagcgctggccacgggagctgtgatgccatcagcggcctgtgtctgtgtgaggctggctacgtgggcccgcggtgcgagcagcagtgtccccagggccactttgggcccggctgtgagcagcggtgccagtgtcagcatggagcagcctgtgaccacgtcagcggggcctgcacctgcccggccggctggaggggcaccttctgcgagcatgcctgcccggccggcttctttggattggactgtcgcagtgcctgcaactgcaccgccggagctgcctgtgatgccgtgaatggctcctgcctctgccccgctggccgccggggcccccgctgtgccgagacctgcccagcccacacctacgggcacaattgcagccaggcctgtgcctgctttaacggggcctcctgtgaccctgtccacgggcagtgccactgtgcccctggctggatggggccctcctgcctgcagggtaagccacatctaggagtccagggaccggggtccaggcctgagcgagggtgctggcctcttgcagggcccacaggacacttggtgcctgggggagggaggaaggggctgttaggactgaggaccgtgcctttcacctgtgcccctctccaggcagggatggggagtgaggctgggctggcaggtcatcctaggggcagccccctgcaaggtgcctgaccccaaagtccaacatggggctggaaagccagacagaccctgtggggccagctggctgggggatgcaggttgctccctcttccctggccccagcctgccctgccggcctgtacggcgacaactgtcggcattcctgcctctgccagaacggagggacctgtgaccctgtctcaggccactgtgcgtgcccagagggctgggccggcctggcctgtgagaaggagtgcctcccccgggacgtcagagctggctgccggcacagcggcggttgcctcaacgggggcctgtgtgacccgcacacgggccgctgcctctgcccagccggctggactggggacaagtgtcagagcccacctgcccccggcctgtcctggcccacagatccccacgggcccctcctagaagcctccgcagccctcatctttctgcagcctgcctgcggggctggtttggagaggcctgtgcccagcgctgcagctgcccgcctggcgctgcctgccaccacgtcactggggcctgccgctgtccccctggcttcactggctccggctgcgagcaggcctgcccacccggcagctttggggaggactgtgcgcagatgtgccagtgtcccggtgagaacccggcctgccaccctgccaccgggacctgctcatgtgctgctggctaccacggccccagctgccagcaacgatgtccgcccgggcggtatgggccaggctgtgaacagctgtgtgggtgtctcaacgggggctgctgtgatgcggccacgggggcctgccgctgccccactgggttcctcgggacggactgcaacctcacctgtccgcagggccgcttcggccccaactgcacccacgtgtgtgggtgtgggcagggggcggcctgcgaccctgtgaccggcacctgcctctgccccccggggagagccggcgtccgctgtgagcgaggctgcccccagaaccggtttggcgtgggctgcgagcacacctgctcctgcagaaatgggggcctgtgccacgccagcaagcggcagctgctcctgtggcctgggctggacggggcggcactgcgagctggcctgtccccctgggcgctacggagccgcctgccatctggagtgctcctgccacaacaacagcacgtgtgagcctgccacgggcacctgccgctgcggccccggcttctatggccaggcctgcgagcacccctgtccccctggcttccacggggctggctgccaggggttgtgctggtgtcaacatggagccccctgcgaccccatcagtggccgatgcctctgccctgccggcttccacggccacttctgtgagagggggtgtgagccaggttcatttggagagggctgccaccagcgctgtgactgtgacgggggggcaccctgtgaccctgtcaccggtctctgcctttgcccaccagggcgctcaggagccacctgtaacctggattgcagaaggggccagtttgggcccagctgcaccctgcactgtgactgcgggggtggggctgactgcgaccctgtcagtgggcagtgtcactgtgtggatggctacatggggcccacgtgccgggaaggtgggcccctccggctccccgagaacccgtccttagcccagggctcagcgggcacactgcccgcctccagcagacccacatcccggagcggtggaccagcgaggcactagtagaggcagtcccgtggagcccgcctctccagtcccagccagaggggaccctggcctttggtgaccactgagaaggacacttcacgggcccagagctcctggtactgcccttcctttgagggccgtggagggctgtggacagcccagcaacctgtcgctcttggaggctggtgtggccttgaggagggaagcctcgcatggccgctggaagagaggcgcctcctggcctggctctgcagaacccaggggcacgctctgggcctgggctgaggaagtcccgctctccccgcggctctgagttggactgaggacaggtgtgggcgccagtgtgggtgcaggcgcaggtgcaggcacagggccactgtcctccaggcaggctttttggtgctaggccctgggactggaagtcgcccagcccgtatttatgtaaaggtatttatgggccactgcacatgcccgctgcagccctgggatcagctggaagctgcctgtcatctcctgcccaatccccagaaaccctgattcaggtctgcaggctcctgcgggctcaccaggctgctggctccggtaccatgtaaacctaggaaggtaaaggagcaggcaacctcctcgtggcctgtgtgtttgctgtgttacgtggactctgtgtgggctcctccctggggcccggccagcataacggtgcacccagggacctcccagtgcacccggggccctttgcaggggtgggggtgccacacaagtgaagaagttgggactcatctcagttcccagtgctattgaggagaacgctggggctgcattcattaccgctgagacccagagactggctgttcccagagaatggcccagggggaggagggctggtgtggaggggcaacctggactgaggccgaactcccttgggctcaccccacccacccctacctgagcatcagcagtggggggagggcagcatcgcaggggcagggactccctgggtgaggacagaccagccctcccgagcacctggcactcatgggctgaggctgacttctcctggaagaagggcccagagtggaaggaagaggcagagggtagaggtggtggctgggggctcctctgcagagtggggtggccaatggagagggctgcactcacaccgcaacataggactctctctcccttaagaaggcccccttagggtctgggctgccgcccccatcaccctaaaaccagccaaggtagctgaggccccagggcagacaatttcaccagcaggaggaggaggagtccagtgagcttggttgctcacagacagcaagggagctgtcacagaggaagctgatgaatggaccgctgtggggagactttaaagtagaacagtgataagggagggcaggatggtggggatgcagaagcagcagccagagagagacggactggggtgcagacggagtgtggaaaacgcataccttgaaatgaagcatccagcagatggggtgagtggatacagctcaggagattctcccaggaatagcagggaggcgtaaagagagacaacgtacagagatagatgaatggaaatgggtaagggaggtgttcattcacatccatctaactgcaaaatacaaaagtaagaagtcattgacatgaagcaacgacgaccaagacgttctcagatctaaaggtgaatgatctcagtcagcctggaaatgcacaaggtggaaaaataacataaaaaagccataagaccttgaagaacatcaatgtcaaagataaattctaaagtcccagagaaaaaagaatgggaatcaaattgacctcagactatacgtgagaaacacggagagccagaaaactgtgatgttccatcctcagagtttgaaggaaatatttgaaggctgaattttacatccagctaaactatcaaaggcatgcaaagtccatgttattcttaggccttcaaggcctcggccatttttctacagaaaagcctgattttaaaatgctcttagagacgttctccagccagaagagaaagaagccaggagggtgctctgagatattcagtcaccacagttcccaaatggcctaggaattcagagagtcagaatatcaccattactccccaatgggaacccccgacagtctcagcatggtgtgagggtgtggacggggggcctggcaggtaccaatcactcatcccgctcagtgaagacacagtgttcagctacggaagccataaggcaggccgagcttctgcccatccggaggaaatctcagctatccaacggcggtcaggagcagaggaaaataaagcagaataactagaaaacacgctcacagatcctaatgttaacggttacaaatgacgacggaaaaacaaactcctgaccatatattatatagtttcaagcagcaagaaggaggatattgaacattctcaacacacataataaacgcttgagatgatgatatgctcattaccctgatttgatcactagacatcccatgtatcaaaacatcactgtgtatccgatgaatatctacaattattgtcaattaaaaacatcattaaaaacaa

SEQ ID NO: 1725 - protein, 294 aa, Homo sapien
MGLESQTDPVGPAGWGMQVAPSSLAPACPAGLYGDNCRHSCLCQNGGTCDPVSGHCACPEGWAGLACEKECLPRDVRAGCRHSGGCLNGGLCDPHTGRCLCPAGWTGDKCQSPPAPGLSWPTDPHGPLLEASAALIFLQPACGAGLERPVPSAAAARLALPATTSLGPAAVPLASLAPAASRPAHPAALGRTVRRCASVPVRTRPATLPPGPAHVLLATTAPAASNDVRPGGMGQAVNSCVGVSTGAAVMRPRGPAAAPLGSSGRTATSPVRRAASAPTAPTCVGVGRGRPATL

SEQ ID NO: 1726 - DNA, 1556 bp, Homo sapien
ctcggggtaatgctcttctccaaactgtttttcggaagcagcggtgaacgggatcgtgcacgatgtggacgtgctgggcgcgggcatccggctggtgaccctgctggtggatcgggacgggctgtacaagatgaaccgcctgtacctcacccccgacggcttcttcttccgagtccacatgttagccctggactcctccagctgcaataagccgtgtccagagtttaaacctggtattgaaactgacctgaatgacgctgcatatgtactttataccaccgtttgtaacgtgggtgccacagcccgggctgtaggtcgcccagcctttttttgggagcgatggggaacaatgacatgaatgggatttagacgacaggcagcaggtatattgtgatgggccacatctaccataagagacggcagctccctacagctctgctccaggtcctgagaggccgcctccgtccagggatggactgctaaggagcagcagcagctatgtgaaaaggtttaatcgaaaaagggaagggcagattcaaggtgcagttcatacccaatgcatttgaaacaaccatcctggcatttctggaccgcaagagacttggacgtcggcaacaagacatgaaaggtctaccttcatgtaatgggtcctccttcagaagagagccctcagctactctgtgaatgacttgcatagctgcaactgtaatctcgaaggtgtcactttgttatttacaagatgcttcttaaatgggctgctcctgagcctcagtgtcaaggtgattcaactgttgtgccagacagtgatttacacagctcagataactgacctgtctagttaacagatcactgcttcatgttttcaaatattttaatttaatacattctttagtagaaatagtccacaaaaacattttcttgaatttaaatatacaacttttatatcatgtatcaaaccagattttatattcaaacgatcacattttaaattctgtacataacagtaagcgcactagtcaaaagacatttatgtttgaaatgtcatttagatcaaacacaagggtcaaagcccaggacaagtattaaagttttatacttaaagagtactaaagggccagtgtgcagatgggtggattaaaaaaataaataaaataaaaaatagtactaaagggcttacttcaggcaaaagtgttcctgacgtaccaaaaagtaagatatagtttattttcatgcctccctgctcctagtaatgtatgttttgtgctgaactggcagctatcccaatgtgaaatgtattttggatgtatctggtgtcatttttctattaagaccaagtataatgtttgtttgtaaagcaataaatcttgacttgaaatcagatcttggatgcacctgtttgtttttgttttagccttactgagccctaaaggtttgagaaaaaggctttctcaaattcattccccaaaccttggaaccaatattcaccaatgacggctcacaagcaagcgaattttaaacatttttcagttggttttaaaaaggtttaattggccggg

SEQ ID NO: 1727 - protein, 69 aa, Homo sapien
LGVMLFSKLFFGSSGERDRARCGRAGRGHPAGDPAGGSGRAVQDEPPVPHPRRLLLPSPHVSPGLLQLQ

SEQ ID NO: 1728 - DNA, 5574 bp, Homo sapien
ttttggctgcctctgtcggtctgttcagttaccacgtgaaccgccgacggagacccgtagtgggggaggcggcggcagcgttaagtgagaaaggaaaaaagacaacgaggaaaaaggaggtgtccgggtagggcaacgcggcgacacccgaggcctggtggtggcggcggatcgagatattcaaggctgaagcagctacggaacggcagcggcggcggtcggacaaactgactgaccgagccgggtggtggcgggagcagcgggagcagccggaacgatgccggccgtgagcctcccgcccaaggagaatgcgctcttcaagcggatcttgaggtgttatgaacataaacagtatagaaatggattgaaattctgtaaacaaatactttctaatcccaaatttgcagagcatggagaaaccttggctatgaaaggattaacattgaactgtttggggaaaaaggaagaagcttatgaattggttcgtagaggtttgagaaatgacttgaagagtcatgtgtgttggcacgtttatggccttcttcagaggtcagacaagaagtatgatgaagccattaagtgttacagaaatgcactaaaatgggataaagacaatcttcaaatcttaagggacctttccttactacagattcaaatgcgagatcttgagggttacagggaaacgaggtatcagttacttcagcttcgacctgcgcagagagcatcatggattggttatgctattgcttaccatttattagaagattatgaaatggcagcaaagattttagaagaatttaggaaaacacaacagacatcccctgacaaggtggattatgaatatagtgaactactcttatatcagaatcaagttcttcgggaagcaggtctctatagagaagctttggaacatctttgtacctatgaaaagcagatttgtgataaacttgctgtagaagaaaccaaaggggaacttctgttgcaactatgtcgtttggaagatgctgcagatgtttatagaggattgcaagagagaaatcctgaaaactgggcctattacaaaggcttggaaaaagcactcaagccagctaatatgttagaacggctaaaaatttatgaggaagcctggactaaatatcccaggggactggtgccaagaaggctgccgttaaactttttatctggtgagaagtttaaagaatgtttggataagttcctaaggatgaatttcagcaagggttgcccaccagtcttcaatactttaagatcattatacaaagacaaagaaaaggtggcaatcatagaagagttagtagtaggttatgaaacctctctaaaaagctgccggttatttaaccccaatgatgatggaaaggaggaaccaccaaccacattactttgggtccagtactacttggcacaacattatgacaaaattggtcagccatctattgctttggagtacataaatactgctattgaaagtacacctacattaatagaactctttctcgtgaaagctaaaatctataagcatgctggaaatattaaagaagctgcaaggtggatggatgaggcccaggccttggacacagcagacagatttatcaactccaaatgtgcaaaatacatgctaaaagccaacctgattaaagaagctgaagaaatgtgctcaaagtttacaagggaaggaacatcagcggtagagaatttgaatgaaatgcagtgcatgtggttccaaacagaatgtgcccaggcttataaagcaatgaataaatttggtgaagcacttaagaaatgtcatgagattgagagacattttatagaaatcactgatgaccagtttgactttcatacatactgtatgaggaagattacccttagatcatatgtggacttattaaaactagaagatgtacttcgacagcatccattttacttcaaggcagcaagaattgctatagagatctatttgaagcttcatgacaacccccttacagatgagaataaagaacacgaagctgatacagcaaacatgtctgacaaagagctaaagaagctacgtaataaacaaagaagagctcaaaagaaagcccagatagaagaagagaaaaaaaatgcagaaaaagaaaagcagcagagaaatcagaaaaagaagaaggatgatgatgatgaggagataggaggtccaaaagaagaacttattccagagaaactggccaaggttgaaactccattggaagaagctattaaatttttaacaccgttgaagaacttggtgaagaacaagatagagactcatctttttgcctttgagatttactttaggaaagaaaagtttcttttgatgctacaatcagtaaagagggcatttgctattgattctagtcatccctggcttcatgagtgtatgattcgtctctttaatactgcagtgtgtgaaagtaaagatttatctgatacagttagaacagtattaaaacaagaaatgaatcgtctttttggagcaacgaatccaaagaattttaatgaaacttttctgaaaaggaattctgattcattgccacacagattatcagctgccaaaatggtatattacttagatccttctagtcagaagcgagctatagagttggcaacaacacttgatgaatctctcactaacagaaacctccagacatgtatggaggtattggaagccttgtatgatggtagcctaggagactgtaaagaagctgctgaaatttatagagcaaattgtcataagcttttcccttatgctttggctttcatgcctcctggatatgaagaggatatgaagatcacagttaatggagatagttctgcagaagctgaagaactggccaatgaaatttgaacatcactaaacaagcaaatggaatgactttggaccatatctagtatataatatttttgtcacgcacctgctgcattgctctaacttacacagaatgagaggagtaaatgttcttgccttcaaatagtgttttacgttttttatcctgctgaaaaagtatatataaaatatctaacattacaggatagaggttcagtttcttaaaaaattaaagctgctaaaattgagtggttaaaaaagataccttatcctattcctccccacccacccatgtttttaaactaatttatataaaatctggaggctgttacagctaacaaagcaggtgtgtggcagaaatattactttaaatttgtcttgtgagattttactatatctcagacagcataaatgctgttttagcactggattctttcactgagcacaaagagttgttggggctttagcatctgactgattttgttacggggttgattctgaccataggaagtatgcaatgtgaatcactatttacagagaaacctacaacagatgcttgatgttgtagaaactgggacatatagataccaagcaaaattataagaaacctataaggtgttcaatacgcttgtgtttccaaaattcactgtacatgatcagtttggtgttcttgtaccacagtttttaactgaaggaaccagttgtaacagtctcaattttaactaaaacttgaagaactaaaacaacaatgcaaacctttcagcattgtttggccaaacttgttaaaactgtaatgcaagaaccaaatgcactgtgatgtggcaccaactaattagcaagcatgaatttttcacccaagagtgaaaaaaggaaaatctaccatggcttgaagttaaagagcagaactcctgactaccattctatgactgatcaaaagactaatagttaaaaacctcagcaggccttgttcacgatatgcagaaaaaaaagtgctgcagtttagatacctctggaatttttccacagtgtcacaggtttgtaatacttgaagccctacatttctaagaatatatttcttgctcagttgtttcaggcaagcccaagactttgtaatttttaaagggcccaagatttttttttttttttttttttcaaataacagaccagcttctttttcttgcagttacagatgtaatttcctttttgttgtcaaacataaggtaccaaatatgatgcaataaattgttttgaaaaacagttgtgtgaatatttcaactaatctgtgttgggcttctgtgaaatacacaggtggaaacagaggtgcaagccagaggcaatgtaatatgctgtaaggctagtgcagatgggagctttttagaaggggctaagtgctggtgtcagggaaattccataatgaagtagaatgctgctcctgcattaagatttcattgagggcaaggctggtggcaggtactatgaatgtaattcataatttaaaaggaaaactaaaaactattttgatttgggaaaatgagccttaatttgttaaacctatacactgagaactagcctcaggcttaatattctcattgcatttgcaagatctgagcaaataagattaagtaaaacaaatcaattgtatatataattgacctttttgtggaacatgtagtttatagaaagtatactctaaagggaatttgccgaagaccttttactgattgaacagttgtgctacaatcaacttttcatagtacatgacctgcattccacatctcagtctaacagtttagtagtgatgtaaagagaagtacaaaccgaactccagtgctttgttatgttttattaactggccctgtctcaggaacatcttaacagatggcaaaaaaacaaaaactttttttcaactcctatgagtggcaactgaagttcttattgttgggaaagaacactagtcctacctctgccactaatgaggtgtttggaggaggtaccagccatataatagggggtgtatgtgtgaattttgtttaaactctactgtatattgaaatgaaattcatttatttgtcttgacaatgttcaaatgatgtagattgtcttagaatgaatattcataagtactcagaactcttaagatgcagatgccacccgtgaggagctaaattcctaatgtgtattgtattccaacccaattttactggaactattgaataaatcttttattttctttcaggtttacttgatagtggatacattggtgtcagaggaccttgactgggttcattttatgtccagacatcacccctgaaacactgtactgtactatcttgctctgagtagtatcaactggatcgtctcatatttgcctcattcatcctattaatttcaaatgatactgtgggggaaaaacagggttagaaaaacaagtggaaaaaatggagtgatgttgtaatctaaacaagtgccttatgtttattgctaagaactggtgttaccaacccttttgagaagaaagggtctcttgacctgtattaacataggaaagtaaagttctttttgtttttctttataagctactcttgtcatttctcgttgaaaaactaaaatctgactaggttagtttactcagctttaattagatagttgagtcatatattttcaacatttttctgtatcgtatttattatgcacaaaaataaagtgtgatctctaat

SEQ ID NO: 1729 - protein, 866 aa, Homo sapien
MPAVSLPPKENALFKRILRCYEHKQYRNGLKFCKQILSNPKFAEHGETLAMKGLTLNCLGKKEEAYELVRRGLRNDLKSHVCWHVYGLLQRSDKKYDEAIKCYRNALKWDKDNLQILRDLSLLQIQMRDLEGYRETRYQLLQLRPAQRASWIGYAIAYHLLEDYEMAAKILEEFRKTQQTSPDKVDYEYSELLLYQNQVLREAGLYREALEHLCTYEKQICDKLAVEETKGELLLQLCRLEDAADVYRGLQERNPENWAYYKGLEKALKPANMLERLKIYEEAWTKYPRGLVPRRLPLNFLSGEKFKECLDKFLRMNFSKGCPPVFNTLRSLYKDKEKVAIIEELVVGYETSLKSCRLFNPNDDGKEEPPTTLLWVQYYLAQHYDKIGQPSIALEYINTAIESTPTLIELFLVKAKIYKHAGNIKEAARWMDEAQALDTADRFINSKCAKYMLKANLIKEAEEMCSKFTREGTSAVENLNEMQCMWFQTECAQAYKAMNKFGEALKKCHEIERHFIEITDDQFDFHTYCMRKITLRSYVDLLKLEDVLRQHPFYFKAARIAIEIYLKLHDNPLTDENKEHEADTANMSDKELKKLRNKQRRAQKKAQIEEEKKNAEKEKQQRNQKKKKDDDDEEIGGPKEELIPEKLAKVETPLEEAIKFLTPLKNLVKNKIETHLFAFEIYFRKEKFLLMLQSVKRAFAIDSSHPWLHECMIRLFNTAVCESKDLSDTVRTVLKQEMNRLFGATNPKNFNETFLKRNSDSLPHRLSAAKMVYYLDPSSQKRAIELATTLDESLTNRNLQTCMEVLEALYDGSLGDCKEAAEIYRANCHKLFPYALAFMPPGYEEDMKITVNGDSSAEAEELANEI

SEQ ID NO: 1730 - DNA, 2416 bp, Homo sapien
cacagaaacatgatgtggaagtgctggaacggaacttccagaccatcctgtgtgagtttgagaccctctacaaagctttctcaaactgcagcctcccgcaaggatggaaaatgaacagcacccccagcggggagtggttcaccttttacttggtcaatcagggggtttgtgttcccaggaactgtaggaagtgcccacggacgtaccgcttgctcggaagccttcggacctgtattgggaacaatgtttttgggaacgcgtgcatctctgtgctgagccctgggactgtgataacggagcactatggacccaccaacatccgcatccgatgccatttaggtctgaaaactccaaatggctgtgagctggtggtggggggagagccccagtgctgggcagaagggcgctgccttctctttgatgactctttcctgcatgctgcgttccatgaaggttcagcagaggatggcccacgggtggttttcatggtggatttgtggcatccaaacgtcgcagcggccgaacggcaggctcttgatttcatctttgctccgggacgatgagagtatttcccatgctggagtcggcgagaagggccgaggcggggcctgggcagactgtggtccggtccagtccctaccggtgttgtttccatgctcagaaacctgcctcagcggaaagctcttatttgggattttatatcatgtcgggtccctctttcccttggttattgtaaatggaaacttttcggcttgtatttccttagattttttttttttccttccaatcatttgcttcagagactcctttctggcctaacagcgcattcctttgattggtccttgagtgaccagagacttagtgcccttgtaagtctgtcttctgttgctacttgtttttttcagtgctctgaaatagagtaactaaatggttatttgtctgaatataataatgtaaaacttcttgtggtcatcttaaaaaaaaaaaaaaaaaaaaaactaaaaactgcaaaccagagagctagagaacttggcctctgatgctggcacactggggacccttcagccacctgacggcagggggacagtctgcagcccccacacctgactggcttcagtagccaggtggaggggctgccagacacagtcagggtggcacacagtgtccaggcccagggatactgtcaccatcgctcacctcattctaaaccttgtcaggtccctgatggcaaaagcattgggccagtaggactggaggctactctttaaacatggctttcctgcaaagctgaagctggtgtcccccagcaccaagctgcggctcacacagatcagccacggaacgtgtgatccgcttacctcactgcctacagaagccctactgccaaactgggcctggaaaattcccagttttaggtgttttgagtccacagtgatgaacgttaaggccaccaggttggctgataggagctgtagggggataggaccgcgctcacccagcgacatttggggaaagcctttctctggcaaaactggaataatagatctgaccaaagtttctgttttgctttggagttctgttgcctatgtttttttttttttcatttatttgtctgtacataaatgttcaaacactagacttggagatagtggaagagttggccctgtgtctttgtcatggcacaaaggtgtgcactgcgtgacaatgacccaagccagtgtgtgctagtgaggagacagagaagacctacatgcccagaggacccgtggccgttgtgctggttttctggtctcctgtgaagaacatgtggatctcttcccgaaggaaaaggtcccaggagaccagtttgaggcactcactctagaaatagcctgtgttagctgatgtgtgaaagcgtagccggccagccacactagagatgccttttctgaataatgtattatgagcagtgtcagatttataaagccgaggagtggtttggaatatacagctggtcgcaggtgcaggtccagtgtttagatccaaatggaaaacagcagcttctaagaggtacaactgttggaagaaaacacagttgaaatgcaccaggcaggtactagcaagtgtgcaaagagcacgtctacatttgagtaaaatgtctacacagatatttgtcagtgatgagaatgcaggaaaaggcagacatttcaaacatacctgaagtctttttactcattatcttgttaaagaatcactgaggtgcatgatttctacacatcgtgactgctctgctctgcgtttacaaaaccaacagcccgcgcaggtacctagctacctgcattcatgtgacatgtctggggaacagaagataaataaaggatcttgctgaaaaccagaaaaaaaaaaaaaaaaaaaagaaaaaaaaaaaaaaaaaaag

SEQ ID NO: 1731 - DNA, 2688 bp, Homo sapien
gaattcggcacgagaatgagccccacagaataaaggtttttcctcttgctgtggcctactggaagccttcctaactctatagctggtaaagtagagcagaaagggccagaatggcttaagatggagctaaatccctatagcattccattttctgctcttgcctcttgaacttagaaggcttgcccatatatcctaacaatctgttctctgagctgttaggccaatccctggtctcaaactcctgacctcaggtgatccacccactatggcctcccaaggtgctgggattgcagatgtgagccaccgtgcctggccagaaaatctggattcttattcctagttcttcatttctgtcacatgcacttagttgacattacatctacatatattagctttttcctacatgagccatctatttacttagtaaccagtgttcttaatgaagtatttagtcttgggtttcttgtaaaatttctctgcattccttagacagtgtactatacatgaaatattcttgttgacctagtaatttatattattccatttaattcttaaacctatggcctttttattgagcacactcttaaatcattatttggcttgtaaacattcatctgaattgtggctacaatcctctttaaataatctaggaaaaaagaaagataaagcttacattttcacagttttggctcttaaacacattccacaaatgccattaagaatttattttgttttaggccagtcatggtggctcatgcctgtaatcccagcaatttgggaggctgaggcaagaactgcttgagcccaggagtttgagactagcctgggcaacatagcaagaccctgtctctaccaaaaaaaaaaaagtttattttgttttagagtcatttaatgtgtttttatgcacaataatagtgggaggttgttttgttgcatttgtttgtttgttttgttttgttttgttttgctttccatgtgggaaaagttaacattggaactgtttctagtaaaagatttttttcaggctgggcacggtggctcatgcctgtgatcccaacactttgggagaccgagggagctggatcacctgaggtcaggagttcgagaccagcctggccaacatggaaaaactccatctccactagaaatacaaaagtagcctggtgtggtggcacatgcctgtaatcccagctacttgggaagctgaggcaggagaatcacttgaacctgggaggtggaggttgcagtgagccaagatcacgccattgcactccagcctgggcaacaagagtgaaactccgtctcaaaaaaaaaaaaaaaaaagatgtttttcatttttttcatgttatctatccaagcactgttccatggtcagcaagtcatatttcataatgtggattttccaaaataattattgaatacagctattctatggctacttttagtgtttttgtggtatgtggtgtgggagtgtttatggaattaccagtatcttaaattttcaaaggaaccttggaagtctatcactctaaatgaaagtctgtcactctacatgaattatgtgctcaaatttgaccaactcagtttaagacacaaaacagtaatttgaagaaggaaaaatgaagagagtttctagtttaatgggttaaatttttgttgttgcaatagtaagtttagtcttcttataatatttctaaatgaaaaatcataggtatttgttaccatgtgtgaagattactttgttaaaagcaaaagtggtcgtgtgatatgctaaatgttaattactgattttatatgtttaaatcacgccaaacaaattatgtctgtgccatccagggtctgttgttaatctttttctgagtacttggattgggataaagggcttgtactatgcactttttattaatgaataaatagaaaacgttagtaacactttgtgttttctgtttggcttttgtgggaagagaagcaagcatcttttgcctagtagatgttaacattgtgtattaaacagtttctttgtaagacctaactaaagacattcctaagagagaacttaagttttaagaaaagttgtgagaaaaatattcataaaatatgcagtatggggccagtattcagaagtagagtttctctcttggaaattagattgcagtcacatttctttggttattttctttctctctctcttcctagaataccaggtaaaatagacatttactttgagggactaatatccaatagtgttaattatttaagcagatatatctagctcaaaaggaaccagacatgtcactgtaccaaaaacacacaaaagtgaaaatttgcttctgttctgtgacctagaatgtgtccagacattaaagatcatgaatactcatatacatgtaaaaatagtaacactgctctggcatgattttgacgtcagtgtttatgtaataacttcagtgttatatttaaaatagataaatttgtgaaataacaatttcttggagacagtcaactttttatgatttaatctaaagattgtcatgtacatgtcaacggatatctgaatcctcagtgaaactgttaagttttcattaaatgactctgctgcaatactagttttcttctcagaaaatggaattcaaataaaataagttttttggtcttggaaaaaaaaaaaaaaaaaaaaaaaaaaaaaaa

SEQ ID NO: 1732 - protein, 43 aa, Homo sapien
MHLVDITSTYISFFLHEPSIYLVTSVLNEVFSLGFLVKFLCIP

SEQ ID NO: 1733 - DNA, 1086 bp, Homo sapien
  Unsure 763-881: Unknown base
tcaagggcctactttatggcagacattgtgctagtgcttttattctaacttttatttttatcagttacacatgatcataatttaaaaagtcaaggcttataacaaaaaagccccagcccattcctcccattcaagattcccactccccagaggtgaccactttcaactcttgagtttttcaggtatatacctccatgtttctaagtaatatgcttatattgttcacttcttttttttttattttttaaagaaatctatttcataccatggaggaaggctctgttccacatatatttccacttcttcattctctcggtatagttttgtcacaattatagattagatcaaaagtctacataactaatactcacagctgagctatgtagtatgctatgattaaatttacttatgtaacttttattgtctttggcattaacagtgtttcaaaaaattttctgtgtatacccatcagtgattcattcccaaatcttctagaagcataagtgtctcaatatattaaaacatattgaataatccttgttagagttatccttgcaggagtccttagtgctcctttatccaatttgtacttgatgccctctaggcagggtgtacagctagctgttgctctggtatttcctataaccttcttggggatttcttttacctcctgtgttagactcctgttttctggattcccccttttccctctttcttggtctactttttgtagaacacaagactctactagcttcctgagaannnnnnnnnnnnnnnnnnnnnnnnnnnnnnnnnnnnnnnnnnnnnnnnnnnnnnnnnnnnnnnnnnnnnnnnnnnnnnnnnnnnnnnnnnnnnnnnnnnnnnnnnnnnnnnnnnnnnnngagactcgaagccactgtttcattgtcactattgagaatctaaatggccattcggattctttcatcatctttataattttaccttcctatttctttcctgtccttttaatggagttttgggagagagcagaggtaaacatgatttgaaaaagccatgtctgaccagaaattctgtgctggcaagatatgtatttcacctttaggg

SEQ ID NO: 1734 - protein, 144 aa, Homo sapien
  unsure 57: unknown amino acid
  unsure 58: unknown amino acid
  unsure 59: unknown amino acid
  unsure 60: unknown amino acid
  unsure 61: unknown amino acid
  unsure 62: unknown amino acid
  unsure 63: unknown amino acid
  unsure 64: unknown amino acid
  unsure 65: unknown amino acid
  unsure 66: unknown amino acid
  unsure 67: unknown amino acid
  unsure 68: unknown amino acid
  unsure 69: unknown amino acid
  unsure 70: unknown amino acid
  unsure 71: unknown amino acid
  unsure 72: unknown amino acid
  unsure 73: unknown amino acid
  unsure 74: unknown amino acid
  unsure 75: unknown amino acid
  unsure 76: unknown amino acid
  unsure 77: unknown amino acid
  unsure 78: unknown amino acid
  unsure 79: unknown amino acid
  unsure 80: unknown amino acid
  unsure 81: unknown amino acid
  unsure 82: unknown amino acid
  unsure 83: unknown amino acid
  unsure 84: unknown amino acid
  unsure 85: unknown amino acid
  unsure 86: unknown amino acid
  unsure 87: unknown amino acid
  unsure 88: unknown amino acid
  unsure 89: unknown amino acid
  unsure 90: unknown amino acid
  unsure 91: unknown amino acid
  unsure 92: unknown amino acid
  unsure 93: unknown amino acid
  unsure 94: unknown amino acid
  unsure 95: unknown amino acid
  unsure 96: unknown amino acid
MPSRQGVQLAVALVFPITFLGISFTSCVRLLFSGFPLFPLSWSTFCRTQDSTSFLRXXXXXXXXXXXXXXXXXXXXXXXXXXXXXXXXXXXXXXXXETRSHCFIVTIENLNGHSDSFIIFIILPSYFFPVLLMEFWERAEVNMI

SEQ ID NO: 1735 - DNA, 1188 bp, Homo sapien
  Unsure 490-523: Unknown base
aatttaaaatttgtttaatgcactggaaataaaattggacatatttcactgtttaaaaaatcagaaacaaaacaaagcaaaaccatgagggaaaaaaacagcaaataagcaacaggggaaaaaagctatgaaaaaaatatatttgtactgaatacacatacaaactacatcccacatgaaagattaatatcatcaagtaagaaaaatacatagtttaaactacaatgctgaaaatataaaaggaacctggtagttcaatggggatggagaaaacagagcattcctctgagagcagagatcttgtcattattgcaattaatgcccaaacaggttaaatgtggaagaaagtatggaggaaataaccccagccttcctcataccactggatttccacatcaccttttaacttatgcttgagctcccttttgagaaaaaatatttaaaaacaaattggctatgtaacaaatttgtgtgtgtgtgtgtatatatnnnnnnnnnnnnnnnnnnnnnnnnnnnnnnnnnngcttgagaaagtggtttttcaagatgtatgtgtacagtacacacatggacacgcttcagtcctctgacttcccatgtgctacctcatgtgtttctcttctcatgaggatttgcaatggatagttgtacaacctggggactgtcagtgactcattggtatcagcatatgctaaagaagctcttgaatccaatcttgaaacctgatctcccttcgtcaacattccccaataccaaactggcccgtttacccatacaaatgcacagtaaagggaagaacagcggtatttttcctagccaactgactctatcatttgtttaatgtttgctggtttttttctggttttgttttgttttagagcaggggtgggagtggctgtaacttcacaatcctaatacagtaaatgttttgcatcttccatgttttatgcaaaaacagacatttaaatcaataaataattgtgccctagactgaaggttaatgtttaggagaggaaaaaaattgttggaattttttctacatttttttgtgaagaatcttttttggaaaggaaggatacatatttttgttgtgtaatattttctatttttgaatgcattttattggtacaagactgtttttttggtgaagacattatttaaaaaaacagtcttgtaccaatagtcgac

SEQ ID NO: 1736 - protein, 67 aa, Homo sapien [sequence omitted]

SEQ ID NO: 1737 - DNA, 3064 bp, Homo sapien
  Unsure 2683-2714: Unknown base
gggggatcataaatgacaggtgtgtggaggtcattgcaaaggaaggacaaaacctgaaagagctatatttggtgtcctgtaaaatcacagattatgcactgatagccattgggcgatacagcatgacaatagagactgtggatgtcggatggtgtaaagaaatcacagaccaaggagccaccctgattgcacagagcagcaagtctctgagatatttggggctgatgagatgtgataaagtcaacgaagtgacggtggaacagctggtgcagcagtacccccacatcaccttcagcaccgtcctgcaggactgcaagaggaccttggagagagcctatcagatgggctggacccccaacatgtctgccgcctcctcctagcgctcctgcctcgcctagtccactgggatcattcagcagagcagaggagaattgtacatttggggagctgatctctcggaagggttttaactgtcacctgtctgtgtgtgttcaagtatgtgtatttgtgtcttgtttgcatactgcataccaaaagtgcagttgtcatttgttcccaagtgagctggctttttttcttagaaattaaagattatgaaagccacaaactttttagtttttaacttcaaaggcttctttctctttaaaaaaaaattatttttaatatagagtcaaaaaattggatgtattattctgagcttctaattgctgccacttggagatgtccaagtaagaaggccttctttttacatgggatgaattgtgcacttctactgatgatgactacagcagaagtgatgttatacgtacaggcacttacactctctcacatattcacacgtatgcacatctacaccagggctctgatctactctagatcgtttcctgacagagaagccttcttccaggccactaaggtagcatgttatccactgtggcactgcctaactccgtgtatcctcgggtggccaacttgctatctggtgggtgacttggggactagaaagaataaagccttttctaaatttgttatatagaggcaacagtctgaactctcctggccagctcacgaaagttaattatacattattctacaaatgcattctgttgagcactaaatattttagttggttttatgttaacattgtgttagcttttatttcctggatagtaactggtcaggatatattttaatgatatttgaaactaatcttagcattgaagccaccaatgtaattaatggtgtgcagttattttaaaaactacagatcatttcattattttcttaattttggtaattattaaagtctatttctgagatacgagagggtagtcacattaatagaagattcatgagtgagatataagtagacaatctttctactgttgttgctctttttgctttgctttgggttcttgaacaggttttttggatatatgcatgttgtcattttggactagttctcatgctactgcaaagatctattgctagctaatatatgagttaagaaagaaaattagaaaatctgttcattgaaattctgtttacacttgtcagaaataagcatttctttgtttaattaaggattgccagcttcagttaagacaagacctatcagtaaatgaatatatgttttgatttaacacatctttacaattaattcataatagggactcaggctcaaataactgttcctgtgtctagatttataatgaggacatcagggagcctttttaagctaaagagtgattatctttcacagtagaactagaaacaaaaccctaacttgtgaagttgctatttatttttccctgagtgaatataactgttatttggtctttaacagatatactgaggtttgagtttcactttctttaagtctcacattgctaacatgacattagctgtaagaaacaagatagctttacatttgaatgccatttactgatttctaatgattctctttttttgtaaacaactgtttcctttgattatgtcaacatgtttctgatgtggcatttttgttttaatcccaatcggttaggaaaatctagtcagtaagcgccatgagtattcttcccataactaaatgggtttctaatttaatttgaagggaataaaatttgtgtaagaaaaaagctgtttaacattaataaactatatttcttcttacacattgaactgtatcattttcatatccacttccccaccactgaaatatcttatttcacaatattttaactgatttttaatccaaaactaatttataagacagtatgtatagtaatagtagcttgagtgaatatgcaaaagtttaatttttatatatgtcatactatattttaaatagttaaaaaagacaaaagaagggagagccatctatgatatagatggtaccatttcagttcaaagttgtaataacctttggagtgttacagtttggttgtcaaatggtttcagaatgtataattgatttttttaaatgttgcattgtttgaatctaaagtacagcactataacatgctttagcttggggggttgggtgtggggtggggacttgcacttattctctaaaatgttgactaatccagaaagcctgatgcaacataatctggaaaactgctttggtacatttgtagaaatccatagaaataccatatccagcctcaaagcattaatctcnnnnnnnnnnnnnnnnnnnnnnnnnnnnnnnngccagaaaaaagcatcaccttgagtggtcctgtgatggttgttgaatgtgttctcattagatgctttgaaatgaggcttaaaataatttttctgggcaatatagagtttcttttttttgcttagaatgtcataaatacatgtgaacacgtttaatgcagggctttttattctctccaaaatgtcaacagtattttcagaataaagactatgaaatatattgctgtagtggaaaattctggtcctttgtctttaatgtctttttgagtggataaagaaaattcacccggtttgtagtttctatatttctgtgaatctttgaccttgcaatgggttgcaataaaagagaaac

SEQ ID NO: 1738 - protein, 125 aa, Homo sapien
GIINDRCVEVIAKEGQNLKELYLVSCKITDYALIAIGRYSMTIETVDVGWCKEITDQGATLIAQSSKSLRYLGLMRCDKVNEVTVEQLVQQYPHITFSTVLQDCKRTLERAYQMGWTPNMSAASS

SEQ ID NO: 1739 - DNA, 4068 bp, Homo sapien
ttagaggtcctttctgctttataacattaggttcttcttgtgaggccttaagcatttgctaaacaggttcaagtaagtttagtaaagtttcattactgccattgattcaattatcaaactgcttttgtacatataaagaattcttcagatgcatggtttctattaacaagatccaatgccttccttttatttccccttcagttcaacatctaatatataaagattgctctgactactacgcaataggcaaaagaagcagtgagacctacagagttacacctgatcccaaaaatagtagctttgaagtttactgtgacatggagaccatggggggaggctggacagtgctgcaggcacgtctcgatgggagcaccaacttcaccagaacatggcaagactacaaagcaggctttggaaacctcagaagggaattttggctggggaacgataaaattcatcttctgaccaagagtaaggaaatgattctgagaatagatcttgaagactttaatggtgtcgaactatatgccttgtatgatcagttttatgtggctaatgagtttctcaaatatcgtttacacgttggtaactataatggcacagctggagatgcattacgtttcaacaaacattacaaccacgatctgaagtttttcaccactccagataaagacaatgatcgatatccttctgggaactgtgggctgtactacagttcaggctggtggtttgatgcatgtctttctgcaaacttaaatggcaaatattatcaccaaaaatacagaggtgtccgtaatgggattttctggggtacctggcctggtgtaagtgaggcacaccctggtggctacaagtcctccttcaaagaggctaagatgatgatcagacccaagcactttaagccataaatcactctgttcattcctccaggtattcgttatctaatagggcaattaattccttcagcactttagaatatgccttgtttcatatttttcatagctaaaaaatgatgtctgacggctaggttcttatgctacacagcatttgaaataaagctgaaaaacaatgcattttaaaggagtcctttgttgttatgctgttatccaatgaacacttgcaagcaattagcaatattgagaattatacattagatttacaattcttttaatttctattgaaactttttctattgcttgtattacttgctgtatttaaaaaataattgttggctgggtgtggtagctcacgcctgtaatcccagcactttggaatgtcaaggcaggcagatcacttgaggtcaggagtttgagaccagcctggccaaacatgtgaaacgctgtctctattaaaaatacaaaaattagccgggcatggtggtacatgcctgtaatcctagctacttgggaggctgaggcaggagaatcgcttgaacctgagaggaagaggttgcagtgagccaagactgagccactgcactccagcatgggtgacagagaaaactctgtctcaaacaaaaaaataataaaatttattcagtaggctggattctacacaaagtaatctgtatttgggccatgatttaagcacatctgaaggtatatcactcttttcaggctataattatttgggtaatcttcattctgagacaaacttaatctatatcatttactttgcaacagaacaaccctacagcattttggttcccagactaagggaactaatatctatataattaaacttgttcatttatcattcatgaaatataaaatacttgtcatttaaaccgtttaaaaatgtggtagcataatgtcaccccaaaaagcattcagaaagcaatgtaactgtgaagaccagggtttaaaggtaattcatttatagtttataactccttagatgtttgatgttgaaaactgctttaacatgaaaattatcttcctctgctctgtgtgaacaatagcttttaatttaagattgctcactactgtactagactactggtaggtttttttggggggggtgggtagggatatgtgggtaatgaagcatttacttacaggctatcatactctgaggccaattttatctccaaagcaataatatcattaagtgattcacttcatagaaggctaagtttctctaggacagatagaaaacatgaattttgaaatatatagaacagtagttaaaatactatatatttcaaccctggctggtagattgcttattttactatcagaaactaaaagatagatttttacccaaacagaagtatctgtaatttttataattcatcaattctggaatgctatatataatatttaaaagactttttaaatgtgtttaatttcatcatcgtaaaaagggatcatctcagagagaacagcagtattctgcgtatttttaaaaatgctctagagtaacatttgaagtaattcactgtagtgtatgccagtcctagaaataatttttttaatttctggtgtctgtttctaatacactaaccaagttttcaaaatatatttacaaagatgcatctttacccattattttaaaatgattaaggaggatagttgcttcaggtaacaagctaatttttcaaatattaggcccttacagaactatttagtcaaaaagtaagatattcctttaaaatatataacccaaagctttcagttaaacatgatatatcacaaatactattaaaatgttaaagagaaatgcaaatagcattaaatgatgaccaaaatgtaaaatattgtagatttcaaaagctgtgtctctattaggtgggataccaaatgtaaatgatgtaactgacgttgttttttactttttactttttaaaaaagactaaaaacgttttgatattatacaatgtatttgtttcagataaggtcattgtcatttagtatatataattaatatatgtacaagtttaagtaaattcctgtgagtaaaaatggacttatcacaaaacatagttctaaagaaaggtatatgctcatatacacggtgtccattaatttaatgggaactaggtataacttcaggagaatttggcaaataattcattaatccatgtaaatattcaaaagcttgttctatccacattatttcaagggatcactttatttttcattatactttcacagcacttttctagtaaattctgtaacacagaaattccattttggaatcatttcatgttaccaataattctagacttttataacatttaacatgttgatggaaatagattacatctgctagaaccttttgccttaactattcaccaatatatgctaatattcataaatatggattgactgtttacaaacattagaatcttgtcttggttccattttgatggctaatatttgttatcttaattaagactatttctgaggtcatgattacttgaaaatattgactaaaactgggtccttagaaattccaggtggagctgatttacctatgactgaggggaaaaaaaaatcaaattttactgataatagtaatgctccaaatgaattaatgacacatctgttcaataaataaagagcttaaatatacaaaacataagaaatctgggcaacaaaacttgtggtctttacttttgaatagctacccaagaaaaggttttaaaggtaaaagttatgagtaatgtcatcacaataagctcttgtttaaaattcttttcttttatgtataattaggtttatgtttcatgtctttttaaaaccttataaaagatttaattatcacatctattcttcaatgtggaaatattaaatattgttggttgtaaaataatatttatgtacttacttgtgtctgaaaagttgtaaaatgcttacctcagctatacaatatctgtgactctgaagactttaatgagtactatttcattaacaagaagtcagaggcaaatagaggaacaccattatcttacttccctctagaatactgttgaaacatttgaaatacaaaagtttcagtttcattttgtggcattcaacttcctctcctctttttccgttattagtgttgctgctctggttagcc

SEQ ID NO: 1740 - DNA, 2000 bp, Homo sapien
tttttttttttttttttttttttttttttttttccattgaaggtattatttatttgcagctcatcttaagtgacaaaattccatacagaagactataacagaaatcatatttaatatattaaaattaatacttcaaatatctttcacattaagatgattatctattgtgtaaatctttcctaggtatgtgtgtctgtttcttgatgtgtaaaccaaaactctgaaatattctcttgatctaactttgacttttaaaaactgacattgtattgaatttacataattctcaatcagaaaaaaaattactgtcagactgcaatgcaagtctgccccaatgaaggcaggaggagggatggctggaagtgtctcagggcactctgaaagtttagcaagcttatcaaggagtcctcaaactaaagctggccaaaaacttcagcataaaaactatcctgtctgtgtattatatatatttattaccaaatttaataaacaaaaaccacttttgaaccaggtaattttatctagtgtgaaaagaaattaatcacatggtcatatactggctagtgctctctaaaagtagacattaaaatatttcataattggagggaatctttggagattagtggcatctaatcttggggcctcagacacccaaaatctatatattgaccagtggaagttgatgatttgttatcaaatttcaaagcacctaatggaaaccccacttcatctctgtgaagattttcagttcctttacagttatttgaaattatttcaattctgtggagccacttcagaaactccaatgggcctttgcaatattaaaatgtggagaatgcattaatcattatttaatcaatgagtttaaaaaatagacaaaagcttctgaaacatgggactgaagtaggcggagcattataaaagcctaaggtaattggtagtgaagagttggaaaaacttacttagtctaatattgtaatttacagataaggaaactgagaagataaataatttattcaatatcactcgatggttcattagtagaagagccagcattatgatgtactcattttgtactctaggagttgttaaaaggcacttaatatcttcttttcttgggtgttagcatttttcattttttaaatcatgctatttagtgttcttaacatttgaaacccaaatggttcacattttgtttttggattgctttgggaatgagtatgtactgttagagaagggcccaatccaaacactagaattttaataatttctactccctctgctggccaactttccagtaaaatggattttaaaaaaagagaaaaaaaaatctagcggtaattgaaacaaaaacaaaaactttaaaaagtgtcttcattataaagaggtgccatgcataaaagcctaggtagtttcaaggtccattcttccattcctcatgattttagggttatcctcattcagatctactctagttataatagtactttaaacagagcacagaattaaaccattagtatgtgaatctgcaaaaagagaacttgttttagactcttctacagtttagacttcaatgtgcatactaaatgcataacattcgtatcaaataattaacatttatatacaattaacaaataaggacaaattttatacaaaacttctactactgctataatttttgaaaacatttaacccactagcaagaggtaagacagcactgcctttttaaaagacaggtcacttgaatagagaatataagatataaccataagtaggagtataaacaataatttttcttcttgtggaatgtttttaaatttcctttcttatattattattcttccttaggtttttttagacaggtcatttcttcctgaatgattttcctttttcttttatttttattttttgaaggaggattatttactggtggtctaaaagaagtaccttcaacttcttcataattgtagccaaagcggaaatggaatatttaataattc

SEQ ID NO: 1741 - protein, 68 aa, Homo sapien
MKAGGGMAGSVSGHSESLASLSRSPQTKAGQKLQHKNYPVCVLYIFITKFNKQKPLLNQVILSSVKRN

SEQ ID NO: 1742 - DNA, 1093 bp, Homo sapien
gctgtgagttggcgtgctagtgggatggcagatgaggaagaagaccccacgtttgaggaagaaaatgaagaaattggaggaggtgcagaaggtggacagggtaaaagaaagagacttttttctaaagaattgcgatgtatgatgtatggctttggggatgaccagaatccttatactgagtcagtggatattcttgaagatcttgtcatagagtttatcactgaaatgactcacaaggcaatgtcaattggaagacaaggtcgagtacaagttgaagatatcgtcttcttgattcgaaaggacccaaggaagtttgccagggttaaagacttgcttactatgaatgaagaattgaaacgagctagaaaagcatttgatgaagcaaattatggatcttgacactttttgtagtttccgaaaattaccatctggggaaaccatatataataattgtatattttctaaagtaagattctgatatctagccgagatcgcaccactgcactccagcctgggcgacagagcgagactccgtctcaaaaaaaaaaaagaaagcaagtttcacatgaataatgctgtgttggaaggctttttgatttaaaatcttttcggatttataacatcctgttaagttttaggagaacccgttttcccagagcagattcaagcttctaaaaataaatgctttcagtagcaggaatggcattgtttaaaaagctgatggcagggtaagcatttgggttagtgttttattaacatatttgtaagtacttgttcattgtggaaatgtgtccttgactaaaaccatacgtggctatggaaaccatgtttgtagttctgaatacacaggttttgtgtgtatttactctatgtattaaattattattgcccttagtttaaagtaaggattacaattggatttaagtagatcactgaatgttattgtttatgaaacttaactttttgtatgctgcttataaacatgatctataaatcagtgcttgggaaaattttactttcttaatctactgatacaggaataaaatatgaacaattaaacagataaaaaaaaaaaaaaaaaaaaaaaaaaaaa

SEQ ID NO: 1743 - protein, 124 aa, Homo sapien
MADEEEDPTFEEENEEIGGGAEGGQGKRKRLFSKELRCMMYGFGDDQNPYTESVDILEDLVIEFITEMTHKAMSIGRQGRVQVEDIVFLIRKDPRKFARVKDLLTMNEELKRARKAFDEANYGS

SEQ ID NO: 1744 - DNA, 461 bp, Homo sapien
ggcacgagggggcggcgggtcacgtcggccgggcatggctgcatggagcccggccgcggcagcgcctctcctccgcgggatccgcgggcttccacttcaccatcggatgtttgccactcagactgagggggagctcagagtgacccaaattctcaaagaaaagtttccacgagctacagctataaaagtcactgacatttcaggcactaaaagaagaaatcaaagagatgcatggattgcggatatttacctctgtccccaaacgctgaccacgccctggctgcatagatgctgctgcttaagaccttggatgaacttcactgacatcattcttccctaagcagtcaccaaaaaatttatatattttgctcatatacatttccatattataattatagaagatgtataatctatttagatgttaattaaaggaaacaaacaactgaagcttttgaagggcc

SEQ ID NO: 1745 - protein, 112 aa, Homo sapien [sequence omitted]

SEQ ID NO: 1746 - DNA, 1268 bp, Homo sapien
gtgagcggcaacatggcgtccaggtctaagcggcgtgccgtggaaagtggggttccgcagccgccggatcccccagtccagcgcgacgaggaagaggaaaaagaagtcgaaaatgaggatgaagacgatgatgacagtgacaaggaaaaggatgaagaggacgaggtcattgacgaggaagtgaatattgaatttgaagcttattccctatcagataatgattatgacggaattaagaaattactgcagcagctttttctaaaggctcctgtgaacactgcagaactaacagatctcttaattcaacagaaccatattgggagtgtgattaagcaaacggatgtttcagaagacagcaatgatgatatggatgaagatgaggtttttggtttcataagccttttaaatttaactgaaagaaagggtacccagtgtgttgaacaaattcaagagttggttctacgcttctgtgagaagaactgtgaaaagagcatggttgaacagctggacaagtttttaaatgacaccaccaagcctgtgggccttctcctaagtgaaagattcattaatgtccctccacagatcgctctgcccatgtaccagcagcttcagaaagaactggcgggggcacacagaaccaataagccatgtgggaagtgctacttttaccttctgattagtaagacatttgtggaagcaggaaaaaacaattccaaaaagaaacctagcaacaaaaagaaagctgcgttaatgtttgcaaatgcagaggaagaatttttctatgagaaggcaattctcaagttcaactactcagtgcaggaggagagcgacacttgtctgggaggcaaatggtcttttgatgacgtaccaatgacgcccttgcgaactgtgatgttaattccaggcgacaagatgaacgaaatcatggataaactgaaagaatatctatctgtctaacccatttccaatggacagtgatgggcttgtttttgtaaaattaccagaaaactcagtggagatttactgaaaaactcagactttattcagattaagttcctctacaaaaagtagggttctgtcccatgtgtctctgacacatttacaaaataccagttttttaaaattttggtcaaattatgagtggttgatttaaaaacttttccaagaagaagaaaagcatggagtcgtaatttaaagaactcaataaaaacttctattttttattttaaaataataccaaaaaaaaaaaaaaaaaaaaaaaaaaaaaa

SEQ ID NO: 1747 - protein, 292 aa, Homo sapien
MASRSKRRAVESGVPQPPDPPVQRDEEEEKEVENEDEDDDDSDKEKDEEDEVIDEEVNIEFEAYSLSDNDYDGIKKLLQQLFLKAPVNTAELTDLLIQQNHIGSVIKQTDVSEDSNDDMDEDEVFGFISLLNLTERKGTQCVEQIQELVLRFCEKNCEKSMVEQLDKFLNDTTKPVGLLLSERFINVPPQIALPMYQQLQKELAGAHRTNKPCGKCYFYLLISKTFVEAGKNNSKKKPSNKKKAALMFANAEEEFFYEEQGKPEVLGGPDTRRGLEPVPIQHNGWSVPPVLE

SEQ ID NO: 1748 - DNA, 2385 bp, Homo sapien
atggccgacttcgatgatcgtgtgtcggatgaggagaaggtacgcatagctgctaaattcatcactcatgcacccccaggggaatttaatgaagtattcaatgacgttcggctactacttaataatgacaatctcctcagggaaggggcagcacatgcatttgcccagtataacatggatcagttcacgcctgtgaagatagaaggatatgaagatcaggtcttaattacagagcacggtgacctgggtaatagcagatttttagatccaagaaacaaaatttcctttaaatttgaccacttacggaaagaagcaagtgacccccagccagaagaagcagatggaggtctgaagtcttggagagaatcctgtgacagtgctttaagagcctatgtgaaagaccattattccaacggcttctgtactgtttatgctaaaactatcgatgggcaacagactattattgcatgtattgaaagccaccagtttcagcctaaaaacttctggaatggtcgttggagatcagagtggaagttcaccatcacaccacctacagcccaggtggttggcgtgcttaagattcaggttcactattatgaagatggcaatgttcagttggttagtcataaagatgtacaggattcactaactgtttcgaatgaagcccaaactgccaaggagtttattaaaatcatagagaatgcagaaaatgagtatcagacagcaattagtgaaaactatcaaacaatgtcagataccacattcaaggccttgcgccgccagcttccagttacccgcaccaaaatcgactggaacaagatactcagctacaagattggcaaagaaatgcagaatgcttaaaggctgaatgtaggattcttcagtatgtggaaagacaaggattcaacgtgtggtcatatgataaataagtgatttataaacaagagtgatattttgctagggctttcaaagttaaccggttttctagcctcatggaatactgttgaacctatagcgttgtcttgattcttttgtgttctctgccttgtaattttctgttactgctatatctacgtgtaaatctttttttctttttttttttttttttttttcttttttggttaattctgccacatttaatgttggtgagagagtgatctatcctaatgacatttactgtttaaaaaagtttcctagccatgaagccctgctactgatttagacaaggtattatggtcattactttgtacccctatccttccaagcacttctggtacttcagtcgtttttactgatccaccaacacctaaagaggctatgctacagtctctagctaaatggaagacacattcatccttctccctctgactgctttgatcatcatttattgcatcgtcatatcatatttatcgcatctcataactaactttctaaagtttggattgggacttttcaggtcctttttggagggcaaaggaagttccagcttctctggggaacttgtttttaaatccaaagacttgaaccacattccctgcacatgaacatgtttgcttttatcccttctctcattggctccttcccatcttagtaccattgtagttatacatctgcattttttagaagcattttacccatttatttttttaaacattcaagaactgctgacgtactgtggatgtagagtataaaacttgaaaaatgcagatgttgaaggaataataggtatcttgtgctttaatactttatggcaggattgtactataagcaaatgaattaaacagctatgtaaatcataaagaaaaactaaaaatgaaccaaagtgaaaggataacttccaggcagtatctttctattgtaacctgttatttaaggaaatactagtgatttcttctaaataggatgtaaacttctttcaaattactcttcctcagtctgcctgccaagaactcaagtgtaactgtgataaaataacctttcccaggtatattcggcaggtatgtgtgtaatctcagaatacacaggtgacatagatatgatatgacaactggtaatggtggattcatttacattgtttacacttctatgaccaggccttaagggaaggtcagttttttaaaaaaccaagtagtgtcttcctacctatctccagatacatgtcaaaaagaaaaggtgtttgtgctccgttttgtttctgctcagtaatatagtcaagcaagtttgttccaggtgacccattgagctgtgtatgcatttttgtttatttcaataaaatatatttgtattatttgtccttcatactatccatccataccacactatcttctgtatcaggtagtctaatagaaatatacctgttttgttctaaaaaaaaaaaaaaaaaaa

SEQ ID NO: 1749 - protein, 286 aa, Homo sapien
MADFDDRVSDEEKVRIAAKFITHAPPGEFNEVFNDVRLLLNNDNLLREGAAHAFAQYNMDQFTPVKIEGYEDQVLITEHGDLGNSRFLDPRNKISFKFDHLRKEASDPQPEEADGGLKSWRESCDSALRAYVKDHYSNGFCTVYAKTIDGQQTIIACIESHQFQPKNFWNGRWRSEWKFTITPPTAQVVGVLKIQVHYYEDGNVQLVSHKDVQDSLTVSNEAQTAKEFIKIIENAENEYQTAISENYQTMSDTTFKALRRQLPVTRTKIDWNKILSYKIGKEMQNA

SEQ ID NO: 1750 - DNA, 2059 bp, Homo sapien
gcagtgatataaatatatttttttcttagactaaatatgagctgactatctcttttgatgtgtgtacataggtgtgagtgtgtgtgtatgcgtgcctgtctgtgtgcgggtgtgtgtatgtgcatagcctcatgcttaggactacccatgaatgttgtggaatgctacacctggagagttctggttttccaccagtttcaagatgaagaactacatgatacagtggacctggagaccatccccttggaaagacaacccagagatgttcagcatcctgtatctacacgcatcctgtatctacacgtgtattttgtagctgtcacactaaccttaataagaattctacagctttggacagaggcattttcaccttaatggtgaagtaatttaaaatataaatccattcaggtgacaacccatcatcaaaattacaaattttctgattgaactcatctgaatcatcagttccttgatggagagagagaaggagatggaatgtgtctggtaaccccaaatggagtacaagtagcctttgttttcctgcataaatggacttgttgaatgcgaacgaatatatgcaattcatatacttttggagatgaacgtagatatgtgtgtcagctttgagatggtgtgtcctggattaatactttgtctcccaatatcacagaaaaatacatgccagtgactcttgaggttaaggtagttgggatgaaatggcctcaggcaatttcacattccctaattacctggaaagttctacagtaattaatatgcagctaactcctgttgccctcacaagagcatcagccttctagaatcggagctccggagtgtgaagattcagtattgatatgatatgtataccaaactccagccaacttactgccatttttcataatctgagtggctgccttgcttatcctaagctgtggttgcagaaaccgtggccatttatataagctataacatcaaatcagggaaaaatgaggaaaaaaaatagattctgaaccatttattgttgaataagtagagaaaatcatcaataaatatttattacattctgacagggtgtgtggcattgtgttctatgccagagtgacaaagttgattcacccctttttggggaccttaatatattttttaagggatgtgcctatgcattgatgcctgaaaaatatgtataaagaaatgaggttgactcttctgagcagttcatcttttccagaggtaagggtaggaggccaacttcaggatctgggtctaagcccgtgggcaagccctggccgagtgagctccaatgctaactcatgtgccgatctctagagcagtgggaaactaccccgctgcaccaaatcaagtagcttcaccttgtgtatgcaggccccaagttattttttagcaatcttacgagtgaaatgttctggtgggttgaaaaacgttcttattttaaagaaaggttgtgctcgctacactgctggtgtgtgcgttctgagacctcttgtattcaatctgtgaaggatatgtgtattaatccgtacacccgtatagcctcaatatttgtctgaagacacttaaattctgacccataaaggaaagttctagaagcaatattttcacttatttaacattctccaaacaacatcaagcattgatacacactgaagagtgcgtttattttttgtatcactctaagtatgttggaatatgcaaggactgtggttcaaattagaatgtataaggcatattataatttagttcatactgaaaaagaaattaacagaacattgttcggttcacacgttccaaaatttgagtgatttctggagttagacatagattttctattttgttttaatttgtcaaggtatttttcttcccttcatgaactttaggtacacataacttatgtcatttatttatggtcttttatacctagtttgtaaaattgtaaaatagcaaactaaatgcaaagagtttgcatttgaaaataataaagtagttaccgtatacaaaaaaaaaaaaaaaaaaaaaaaaaaaaaaaaaaaaaaaaaaaaaa

SEQ ID NO: 1751 - protein, 105 aa, Homo sapien [sequence omitted]

SEQ ID NO: 1752 - DNA, 3639 bp, Homo sapien
ctcgaggctccgcaccagccgcgcttctgtccgcctgcagggcattccagaaagatgaggatatttgctgtctttatattcatgacctactggcatttgctgaacgcatttactgtcacggttcccaaggacctatatgtggtagagtatggtagcaatatgacaattgaatgcaaattcccagtagaaaaacaattagacctggctgcactaattgtctattgggaaatggaggataagaacattattcaatttgtgcatggagaggaagacctgaaggttcagcatagtagctacagacagagggcccggctgttgaaggaccagctctccctgggaaatgctgcacttcagatcacagatgtgaaattgcaggatgcaggggtgtaccgctgcatgatcagctatggtggtgccgactacaagcgaattactgtgaaagtcaatgccccatacaacaaaatcaaccaaagaattttggttgtggatccagtcacctctgaacatgaactgacatgtcaggctgagggctaccccaaggccgaagtcatctggacaagcagtgaccatcaagtcctgagtggtaagaccaccaccaccaattccaagagagaggagaagcttttcaatgtgaccagcacactgagaatcaacacaacaactaatgagattttctactgcacttttaggagattagatcctgaggaaaaccatacagctgaattggtcatcccagaactacctctggcacatcctccaaatgaaaggactcacttggtaattctgggagccatcttattatgccttggtgtagcactgacattcatcttccgtttaagaaaagggagaatgatggatgtgaaaaaatgtggcatccaagatacaaactcaaagaagcaaagtgatacacatttggaggagacgtaatccagcattggaacttctgatcttcaagcagggattctcaacctgtggtttaggggttcatcggggctgagcgtgacaagaggaaggaatggacccgtgggatgcaggcaatgtgggacttaaaaggcccaagcactgaaaatggaacctggcgaaagcagaggaggagaatgaagaaagatggagtcaaacagggagcctggagggagaccttgatactttcaaatgcctgaggggctcatcgacgcctgtgacagggagaaaggatacttctgaacaaggagcctccaagcaaatcatccattgctcatcctaggaagacgggttgagaatccctaatttgagggtcagttcctgcagaagtgccctttgcctccactcaatgcctcaatttcttttctgcatgactgagagtctcagtgttggaacgggacagtatttatgtatgagtttttcctatttattttgagtctgtgaggtcttcttgtcatgtgagtgtggttgtgaatgatttcttttgaagatatattgtagtagatgttacaattttgtcgccaaactaaacttgctgcttaatgatttgctcacatctagtaaaacatggagtatttgtaaggtgcttggtctcctctataactacaagtatacattggaagcataaagatcaaaccgttggttgcataggatgtcacctttatttaacccattaatactctggttgacctaatcttattctcagacctcaagtgtctgtgcagtatctgttccatttaaatatcagctttacaattatgtggtagcctacacacataatctcatttcatcgctgtaaccaccctgttgtgataaccactattattttacccatcgtacagctgaggaagcaaacagattaagtaacttgcccaaaccagtaaatagcagacctcagactgccacccactgtccttttataatacaatttacagctatattttactttaagcaattcttttattcaaaaaccatttattaagtgcccttgcaatatcaatcgctgtgccagggcattgaatctacagatgtgaggcaagacaaagtacctgtcctcaaggagctcatagtataatgaggagattaacaagaaaatgtattattacaatttagtccagtgtcatagcataaggatgatgcgaggggaaaacccgagcagtgttgccaagaggaggaaataggccaatgtggtctgggacggttggatatacttaaacatcttaataatcagagtaattttcatttacaaagagaggtcggtacttaaaataaccctgaaaaataacactggaattccttttctagcattatatttattcctgatttgcctttgccatataatctaatgcttgtttatatagtgtctggtattgtttaacagttctgtcttttctatttaaatgccactaaattttaaattcatacctttccatgattcaaaattcaaaagatcccatgggagatggttggaaaatctccacttcatcctccaagccattcaagtttcctttccagaagcaactgctactgcctttcattcatatgttcttctaaagatagtctacatttggaaatgtatgttaaaagcacgtatttttaaaatttttttcctaaatagtaacacattgtatgtctgctgtgtactttgctatttttatttattttagtgtttcttatatagcagatggaatgaatttgaagttcccagggctgaggatccatgccttctttgtttctaagttatctttcccatagcttttcattatctttcatatgatccagtatatgttaaatatgtcctacatatacatttagacaaccaccatttgttaagtatttgctctaggacagagtttggatttgtttatgtttgctcaaaaggagacccatgggctctccagggtgcactgagtcaatctagtcctaaaaagcaatcttattattaactctgtatgacagaatcatgtctggaacttttgttttctgctttctgtcaagtataaacttcactttgatgctgtacttgcaaaatcacattttctttctggaaattccggcagtgtaccttgactgctagctaccctgtgccagaaaagcctcattcgttgtgcttgaacccttgaatgccaccagctgtcatcactacacagccctcctaagaggcttcctggaggtttcgagattcagatgccctgggagatcccagagtttcctttccctcttggccatattctggtgtcaatgacaaggagtaccttggctttgccacatgtcaaggctgaagaaacagtgtctccaacagagctccttgtgttatctgtttgtacatgtgcatttgtacagtaattggtgtgacagtgttctttgtgtgaattacaggcaagaattgtggctgagcaaggcacatagtctactcagtctattcctaagtcctaactcctccttgtggtgttggatttgtaaggcactttatcccttttgtctcatgtttcatcgtaaatggcataggcagagatgatacctaattctgcatttgattgtcactttttgtacctgcattaatttaataaaatattcttatttattttgttacttggtacaccagcatgtccattttcttgtttattttgtgtttaataaaatgttcagtttaacatcccagtggagaaagttaaaaaa

SEQ ID NO: 1753 - protein, 308 aa, Homo sapien
LEAPHQPRFCPPAGHSRKMRIFAVFIFMTYWHLLNAFTVTVPKDLYVVEYGSNMTIECKFPVEKQLDLAALIVYWEMEDKNIIQFVHGEEDLKVQHSSYRQRARLLKDQLSLGNAALQITDVKLQDAGVYRCMISYGGADYKRITVKVNAPYNKINQRILVVDPVTSEHELTCQAEGYPKAEVIWTSSDHQVLSGKTTTTNSKREEKLFNVTSTLRINTTTNEIFYCTFRRLDPEENHTAELVIPELPLAHPPNERTHLVILGAILLCLGVALTFIFRLRKGRMMDVKKCGIQDTNSKKQSDTHLEET

SEQ ID NO: 1754 - DNA, 1259 bp, Homo sapien
gcgggcgcgaggcggcggcggaggcccgagcccggcccagcctcgtcccgcccggagcccgcctggctgctaccccgaccccggctccggtcccgtcctgtcccggcgcgccgcggcctcgccccggcccccgctcggcgcctcccgagggagcggcgctgccggccgagagcgcaggcccggccatgaccgacttcaaattgggtatcgtgcggctcggccgggtggccgggaagaccaaatacacgctgatcgatgagcaggacatcccgctggtggagagctactcctttgaggcccgaatggaagtggatgcagatggaaatggtgctaagatatttgcctatgcctttgacaagaaccgaggaaggggctctgggagactccttcatgagctgctgtgggagcggcaccgggggggcgtggccccgggcttccaggtggtgcacctcaacgctgtgaccgtggacaatcgcctggacaacctgcaactggtgccgtggggctggcggcccaaggctgaagagacctccagcaagcagagggagcaaagcttgtattggcttgcaattcagcagctgcctacagaccctatagaagaacagtttcctgtcctaaatgtgacccggtattataatgccaacggggatgtagtggaagaggaggagaactcttgcacctactatgagtgccactaccctccctgcacagtgattgagaagcagctccgggagttcaacatctgtgggcgctgccaggtggcccggtactgcggctcccagtgccagcagaaggactggcctgcccacaagaagcactgtcgggagaggaagcgtcccttccagcatgagcttgagccagagcgatgacgggcaggggagccacacatactcacagcccccgggctctaccctgggcacagcagagacagactggtggttgaacctggaggtgccaaaaaagccagctgcgggcccaggacagctgccgtgagactcccgatgtcacaggcagtctgtgtggttacagcgcccctcagtgttcatctccagcagagacaacggaggaggctcccaccaggacggttctcattatttatatgttaatatgtttgtaaactcatgtacagttttttttgggggggaggcaatgggaagggtagaaattacaaatagaatcatttgcaaaaaaaaaaaaaaaaaaaaaaaaaaaaaaaaaaaaaaaaaaaaaaaaaaaaaaaaaaaaaaaaaaaaaaaaaa

SEQ ID NO: 1755 - protein, 227 aa, Homo sapien
MTDFKLGIVRLGRVAGKTKYTLIDEQDIPLVESYSFEARMEVDADGNGAKIFAYAFDKNRGRGSGRLLHELLWERHRGGVAPGFQVVHLNAVTVDNRLDNLQLVPWGWRPKAEETSSKQREQSLYWLAIQQLPTDPIEEQFPVLNVTRYYNANGDVVEEEENSCTYYECHYPPCTVIEKQLREFNICGRCQVARYCGSQCQQKDWPAHKKHCRERKRPFQHELEPER

SEQ ID NO: 1756 - DNA, 1050 bp, Homo sapien
atgaactaatttatttaggcttaatctctaaaatttcagcctgatcttaaccaatgaaatttcaaaaacaaaaactgtacttcagtctacaattgaatggaattcagtgtagaccagtacaatggaatgtactggctgagatgggagggtcccttgagcccaggagttggaggctgtagtgagctgtgatggtgtctgtgaatagtgacggcactcaagcctaggtgacatagcaagatgccatctcaaagaaatatagatatataacataaaataaataactttatacatttcctggaggaaaagtactctgtaaattcaagagatctgaatcaaattactcaaccttttggaatttgatcctctactgtaatactcatatgctagattactgaattttcagagtgaaaaaaaattgacagggtaatatataggccatattatagtgaagatcataagtataaatgtcctcgtttaatctttccatattgaggacagcctctgcatataaaaatgttcattgggagaaaaattatttttaaaactaaatttttatagtagtcctccattactggcaattaaggagcaacccacaaaatgtcattatgtggttctttgattaggcataaaaagtattgcaaacagcttttctattcctttggaatatgaatctttttaatgtctaaagttaacctgcaacattttctagtaggacaagtcaatgtaaattaggtaatttttgcctgttttataccttctgttgcattttgttcaaatgaaaacattttttaaaacatgattgaatttttacttctcagataattggtttgagtgtggaatttcttttttaacactttgatatgtaagttagtgtaaattaatacttttataacactactaggctttatatttttatggaatgttttaaaatttgaaatttttgaagtgttaatttagcagtactttatcattatgtgccaatactgacaagaaaaacaattttttatgtatttaatatactatggtattcaataaattctattttaaaat

SEQ ID NO: 1757 - protein, 9 aa, Homo sapien
MVFNKFYFK

SEQ ID NO: 1758 - DNA, 345 bp, Homo sapien
ttttttttcattaaaaaatagtgctctttattataaattactgaaatgtttcttttctgaatataaatataaatatgtgcaaagtttgacttggattgggattttgttgagttcttcaagcatctcctaatagcctcaagggcctgagtaggggggaggagagaggactggaggtggaatctttataaaagacagagtgattgaggcagattgtaaacattattaaaaaacaagaaacaaacaaaaaaatagagaaaaaaaccaccccaacacacaactgccctgtccagcccaatacctgacacagaatactttgtgtttgtttagttgcccccccccacataa

SEQ ID NO: 1759 - DNA, 2485 bp, Homo sapien
aaaaaaaaaaaaaaaaccggctcgcggcgcgtggaggctgctcccagccgcgcgcgagtcagactcgggtgggggtcccggcggcggtagcggcggcggcggtgcgagcatgtcgtggctcttcggcattaacaagggccccaagggtgaaggcgcggggccgccgccgcctttgccgcccgcgcagcccggggccgagggcggcggggaccgcggcttgggagaccggccggcgcccaaggacaaatggagcaacttcgaccccaccggcctggagcgcgccgccaaggcggcgcgcgagctggagcactcgcgttatgccaaggacgccctgaatctggcacagatgcaggagcagacgctgcagttggagcaacagtccaagctcaaagagtatgaggccgccgtggagcagctcaagagcgagcagatccgggcgcaggctgaggagaggaggaagaccctgagcgaggagacccggcagcaccaggccagggcccagtatcaagacaagctggcccggcagcgctacgaggaccaactgaagcagcagcaacttctcaatgaggagaatttacggaagcaggaggagtccgtgcagaagcaggaagccatgcggcgagccaccgtggagcgggagatggagctgcggcacaagaatgagatgctgcgagtggaggccgaggcccgggcgcgcgccaaggccgagcgggagaatgcagacatcatccgcgagcagatccgcctgaaggcggccgagcaccgtcagaccgtcttggagtccatcaggacggctggcaccttgtttggggaaggattccgtgcctttgtgacagactgggacaaagtgacagccacggtggctgggctgacgctgctggctgttggggtctactcagccaagaatgccacgcttgtcgccggccgcttcatcgaggctcggctggggaagccgtccctagtgagggagacgtcccgcatcacggtgcttgaggcgctgcggcaccccatccaggtcagccggcggctcctcagtcgaccccaggacgcgctggagggtgttgtgctcagtcccagcctggaagcacgggtgcgcgacatcgccatagcaacaaggaacaccaagaagaaccgcagcctgtacaggaacatcctgatgtacgggccaccaggcaccgggaagacgctgtttgccaagaaactcgccctgcactcaggcatggactacgccatcatgacaggcggggacgtggcccccatggggcgggaaggcgtgaccgccatgcacaagctctttgactgggccaataccagccggcgcggcctcctgctctttgtggatgaagcggacgccttccttcggaagcgagccaccgagaagataagcgaggacctcagggccacactgaacgccttcctgtaccgcacgggccagcacagcaacaagttcatgctggtcctggccagcaaccaaccagagcagttcgactgggccatcaatgaccgcatcaatgagatggtccacttcgacctgccagggcaggaggaacgggagcgcctggtgagaatgtattttgacaagtatgttcttaagccggccacagaaggaaagcagcgcctgaagctggcccagtttgactacgggaggaagtgctcggaggtcgctcggctgacggagggcatgtcgggccgggagatcgctcagctggccgtgtcctggcaggccacggcgtatgcctccgaggacggggtcctgaccgaggccatgatggacacccgcgtgcaagatgctgtccagcagcaccagcagaagatgtgctggctgaaggcggaagggcctgggcgtggggacgagccttccccatcctgagtccacagggagatccacagctcacggagcctggccgcggacccctcccacccctgccttgccggcccctgcacatttaggatatgctcctgggtggggactgggctgtgcccagggcctctgtcccccaggatgtcttgtggtgcgggtcggccgttctgccccccagggcaccccctgttgtaggcactggctagggaggggcaggcctccttcctgcccctcgagacactcttgggagatgcattttccgtctggctcacagggggagggtgaggctttgcaccccagcccctgcccaggccactgtgagggtgggtgctggctgaccccccggggcagcaggagccaggcaggtgatgtctttgttctcggctcccacagcagagccaggtgagggggcgcctgccagggccagacccaggtggggcagcctgaaccctgcttccccctgtggccggcatgccccgatctttcacacactggtgaccctgagagaggagggaggagggaacctggcgggggtgtctgaggccgcactgtcagctggccggtccaagcctgtggctggagctggggtctgtttacctaataaagtcccacaggtgcctcatt

SEQ ID NO: 1760 - protein, 586 aa, Homo sapien
MSWLFGINKGPKGEGAGPPPPLPPAQPGAEGGGDRGLGDRPAPKDKWSNFDPTGLERAAKAARELEHSRYAKDALNLAQMQEQTLQLEQQSKLKEYEAAVEQLKSEQIRAQAEERRKTLSEETRQHQARAQYQDKLARQRYEDQLKQQQLLNEENLRKQEESVQKQEAMRRATVEREMELRHKNEMLRVEAEARARAKAERENADIIREQIRLKAAEHRQTVLESIRTAGTLFGEGFRAFVTDWDKVTATVAGLTLLAVGVYSAKNATLVAGRFIEARLGKPSLVRETSRITVLEALRHPIQVSRRLLSRPQDALEGVVLSPSLEARVRDIAIATRNTKKNRSLYRNILMYGPPGTGKTLFAKKLALHSGMDYAIMTGGDVAPMGREGVTAMHKLFDWANTSRRGLLLFVDEADAFLRKRATEKISEDLRATLNAFLYRTGQHSNKFMLVLASNQPEQFDWAINDRINEMVHFDLPGQEERERLVRMYFDKYVLKPATEGKQRLKLAQFDYGRKCSEVARLTEGMSGREIAQLAVSWQATAYASEDGVLTEAMMDTRVQDAVQQHQQKMCWLKAEGPGRGDEPSPS

SEQ ID NO: 1761 - DNA, 1895 bp, Homo sapien
ggcacagggctgtgactagcgggccggcccgggccaggacagcgggcggcgggcggcgcgggcctggccccgggatggctatgttccgcagcctggtggcctcggctcagcagcggcagccgccggccgggccggcgggcggcgacagcggcctggaggcgcagtacacctgccccatctgcctggaggtctatcaccggcccgtggccatcggcagctgcggccacacgttctgcggggagtgtctccagccctgcctgcaggtgccatccccgctgtgcccactgtgccgcctgcccttcgaccccaagaaggtggacaaggccacccacgtggagaagcagctctcatcctacaaagcgccctgtcgaggctgcaacaaaaaggtgaccctggcaaagatgagagtgcacatttcgtcctgcctgaaggtccaggagcagatggccaactgccccaagttcgtccccgtggtgcccacatcacagcctatccccagcaacatccccaacaggtccaccttcgcctgcccgtactgtggtgcccgcaacctggaccagcaggagctggtgaagcactgtgtggaaagccaccgcagcgaccccaaccgcgtggtgtgccccatctgctcggcaatgccctggggggaccccagctacaagagcgccaacttcctgcagcacctgcttcaccgacacaagttctcctacgacacctttgtggactacagtattgacgaggaggccgccttccaggctgctctggccctgtctctctctgagaactgaagggaagcgcagccacccgcctgcgtctggggtcagggatgtccccgctcctgtgtcgcacctggcacctgctcgggagcgcacctcaccggactgagctcacaggaggagcctgcacccgcgcagaaggggagccggggccgagcctccgggcctgaatacgggccagccgccgaggccgccagagcagggccgcctggtcccaccggcgtcgctgggttcttcggtgcttctggccgagcaggcggcctacttgggcagggctggacgctgggacctggagctgccgccgtctcttcaaagccatgataccccctcgtgggaagaagggaccgacgcgcgagtcgcgctccgcagtcgagccgggaggaacccaggctgctgccctgcccagcccgaccctgccccggccccgcttccaccttgcgcatttggtactggcttttgtgatacttaggaaccctggcatcttttctatattatccagtgtgataatcttttcacgttttatagagcaaagacagagcagttactcttcatattgcaatatctgtgtttgactaggaataatagtatttttatggaacatttacaaaattatattttttaagaaaacaatcaaaacaagcattgggggattggggcaaggatggaaggagcagtggggcagctgccagagctcaggcgagccatggggtctgctgtggggtctgccctggccacccactgtgtgtctgggtccttgaggtttgtacgtttctctttgatgaccaggaagaaatcccagcaccccagccacaggctgtggctgctcccagcagaggtggggccggcagagaaggggcctcctccacccagagtcctggccttggcccgctgtcaccttcaaagctgactgtgccccgctgcgggaggggacggcaccccagtggtggcagagcttgggggcctgggcaggggcccgcttggcgggccgggcaacacgtcaacattcttttctgttcttggcattaattattgctgtctttttttaaaaaaaaaaagtttaaataaaatgtctcagagcaaaaaaaaaaaaaaaaaaaaaaaaaaaaaaaaaaaaaaaaa

SEQ ID NO: 1762 - protein, 237 aa, Homo sapien
MAMFRSLVASAQQRQPPAGPAGGDSGLEAQYTCPICLEVYHRPVAIGSCGHTFCGECLQPCLQVPSPLCPLCRLPFDPKKVDKATHVEKQLSSYKAPCRGCNKKVTLAKMRVHISSCLKVQEQMANCPKFVPVVPTSQPIPSNIPNRSTFACPYCGARNLDQQELVKHCVESHRSDPNRVVCPICSAMPWGDPSYKSANFLQHLLHRHKFSYDTFVDYSIDEEAAFQAALALSLSEN

SEQ ID NO: 1763 - DNA, 3678 bp, Homo sapien
cgagcctagggaggcgaggttcccgcaccggataggaacattctgttgttttcctctgccatctagtggcaaaagaaagtaattttcctggttttttgaatggatagccataccttaaaaagcatccagattgcgcagtagtgctagcggcttcgcggttcagtcctcctaactgacagccgccactggtgctgagctgctaggaagcccctgtcggcgagcttgttggagcttgaacccactgtcacccctccgactcaccggcaaaaaaaaaaatggttgaagcagatcgcccaggaaagctcttcattggtgggcttaatacggaaacaaatgagaaagctcttgaaacagtatttggcaaatatggacgaatagtggaagtactcttgataaaagaccgtgaaaccaacaaatcaagaggatttgcttttgtcacctttgaaagcccagcagacgctaaggatgcagccagagacatgaatggaaagtcattagatggaaaagccatcaaggtggaacaagccaccaaaccatcatttgaaagaggtagacatggaccgcccccacctccaagaagtagaggtcctccaagaggttttggagctggaagaggaggaagtggaggaaccaggggacctccttcacgaggaggacacatggatgatggtggatattccatgaattttaacatgagttcttccaggggaccactcccagtaaaaagaggaccaccaccaagaagtgggggtccttctcctaagagatctgcaccttcaggactagttcgcagcagcagtggaatgggaggaagagctcctctatcacgtggaagagatagttatggaggtccacctcgaagggaaccgctcccctctcgtagagatgtttatttgtccccaagagatgatgggtattctactaaagacagctattcaagcagagattacccaagttctcgtgatacaagagattatgcaccaccaccacgagattatacttaccgtgattatggtcattccagttcacgtgatgactatccatcaagaggctatggcgatagagatggatatggtcgtgatcgtgactattcagatcatccaagtggaggttcctacagagattcatatgagagttatggtaactcacgtagtgctccacttacacgagggcccccgccatcttatggtggaagcagtcgctatgatgattatagcagctcacgtgatggatatggtggaagtcgagacagttactcaagcagccgaagtgatctctactcaagttgtgacagggttggcagacaagaaagagggcttcccccttctgtagaaagggggtacccttcttcacgtgattcctacagcagttcaagccgcggagcaccaagaggtgctggccctggaggaagccgatctgatagagggggaggcagaagcagatactagaaacaaacaaaactttggaccaaaatcccagttcaaagaaacaaaaaaaagagtggaaactattctatcataactacccaaggactactaaaaggaaaaattgtgttaccttttttaaattccctgttaagtcccttccgtaatttttatgttcttgtgaggaaaaaagtaaaacatgtttaattttatttgactttatgacattgcttttcaacaagcaaatgttaaatgtgttaagccttgtagtactagtgttgtaactttccaagtaaaggtgtccctaaagaccacttcctatctggtttttcccagtaaatgaggcaagcaattctaagatcttccacaaaacatctagccatctaaaatggagagatgaatcattctgcctatacaaacaagctagctattagagggtggttggagtatgctactcataagatttcagggtgttttctaactgaaatctcactgttctcagtatgcaaaacctgaaatcagatgcctatgtaaggaaagtgctattcacccagtaaacccaaaaaaagcaaatggataatgctggccattttgcctttctgacatttccttgggaatctgcaagaacctcccctttcccctcccacaataagaccatttaagtgtgtgctaaacaactacggaatactaaataaaaagtttggccaaaaccaaccatgaagctgcaaaggtgcttgctcttactctttcaaatttttgcaactctaatgtctcacttttaaaggaacagcttgattgcaaaggagaaaatagataagcaatgaatttatctccaacttcctaaaggcttatgacttctaaaaagtgaatctatcagcattccacatcagatttaaagcatcaaatgcctgtgaaacagcaaagatggttgaagattgtgctcattatgtttgtggagtgctgattgattcacagtagataacgctggcagtaagagaaatcaaatgctaagagttgttgaagcagaaggcggctgattgttggtaagtcagtgcagttgcataagcagtgctgtcagaattggtttggtgcaggcaatagattttgccttcaagggttcctgtggatctcaggaaggcatcagtgttgattaacactcataactagggagtgagtggtagttacttaagtaattgaccaaatggaaaaggggaagtaattaaggaaattggtaagtggaggtagtcaggaggttctcgtggtcctttacacagattttacagctttgggtttcattttgtttagctaaagtcatggggacaactcttcaatttagaacttaagatgaattataaaaatgatggatataagtggtagctctatctggtgaagtgtcttgtcagtaagtgaaacatttttttgtggtggcttatccacaaacagtttagttgtagaataaaacttatgagtgacatctggaaagtaacaaccatgctaagatggcaaacacactggaaacaattgggccacttggctttcttttgctgtattgttttataagcctgctttacctccccgtcttggaaacaagttttagtttattgctttggagactagagccaatagtgtaatgttctcaaaggaaacagacttgagttgttggattagaggaactaactcaacttctaattttttttgttgtaattatggcactgtcatgttttaacatttgcaactagggatagtaagtacaacatttttaactctcatttggcagactactactaatcacagaccacaagggtaatgaccaaatttatgtggttgttacacttccatagttgtcttagccgaatccttccatattcttatgattacttgggttaaagcttctgtgaggaccttttggctcttaagatatcctaaatatttaaaatatttagatatcctaaatataggatatagagtttgtaccaaatatgaatgaatattgttcaaagcaaggagtatgttaaaatgaccagacacctgtttgataaatagtttactgaactagcagacgtgtggaaaaagaatcagatcttgattcttctgggtttatactggttgtaaaacagaatgatattagaaaatgttttccttgtttaagtggtagttgaacatagaacttgggtattatagatcacttttcactttttggaatgttttgtattgaaacttaatacaactttaacatggcaaaaaaaaaaaaaaa

SEQ ID NO: 1764 - protein, 390 aa, Homo sapien
MVEADRPGKLFIGGLNTETNEKALETVFGKYGRIVEVLLIKDRETNKSRGFAFVTFESPADAKDAARDMNGKSLDGKAIKVEQATKPSFERGRHGPPPPPRSRGPPRGFGAGRGGSGGTRGPPSRGGHMDDGGYSMNFNMSSSRGPLPVKRGPPPRSGGPSPKRSAPSGLVRSSSGMGGRAPLSRGRDSYGGPPRREPLPSRRDVYLSPRDDGYSTKDSYSSRDYPSSRDTRDYAPPPRDYTYRDYGHSSSRDDYPSRGYGDRDGYGRDRDYSDHPSGGSYRDSYESYGNSRSAPLTRGPPPSYGGSSRYDDYSSSRDGYGGSRDSYSSSRSDLYSSCDRVGRQERGLPPSVERGYPSSRDSYSSSSRGAPRGAGPGGSRSDRGGGRSRY

SEQ ID NO: 1765 - DNA, 914 bp, Homo sapien
tcccaaagtgcagggattacaggtgtgagtgagccaccgcggccggcctctatcattttctgactcagcagctccaccaaaattgacatcctagcaaacactgtgaaggaattaacctaagtgcttccagagcatctcatgtaacctctatggagtaagtcactttttctgtaacatgtggcttttgaccttgatgaagactttgacttctcatccctgtctacatggaggaagatgattcagtggtggggaaaatgaacctcggtaacatttccaatgtccttcaagagggaaacaagttcagtgttatcatcgtggcattcgttagtttttttttttttaaatcacttttttagatacaactttatttttttatacctacatagcacatgactggggggataaagcatgtataagttgggagagggtaaagaatgtgtgactatgtatacagaaaatagactaaaatgtgcagcaaaatgatatatactgtaatctggtttttgaagtatctactattctggaatattgttaaacaactttttgcttttgaaaaaaaaaggtgccttgattcagttgcgtgacttagaacattcatcctattttattgtgatttttaatgtcttctgaccccaaactgtgtttttggttgcagtctggcggctgcaggcatagcgtcggttttgttccaataacagagaccaaagagttaatcagatatggttcagctgctacaattgtatgattcaaaggcaatttaatcaccccaaatttccatggcccccacagtcaagacctgccattcgttttctcttgcaggttggagtaaatttgcactttgaatcatgtgggtcatttggggaccttgttcttttctattttgctttattaataaaggaacttgtagaaacctc

SEQ ID NO: 1766 - protein, 56 aa, Homo sapien
MIQRQFNHPKFPWPPQSRPAIRFLLQVGVNLHFESCGSFGDLVLFYFALLIKELVE

SEQ ID NO: 1767 - DNA, 995 bp, Homo sapien
ggcacgaggggcaccttggcgaggtggcgctgccggaggctgagggctatctacaccatcatgcgctggttccggagacacaaggtgcgggctcacctggctgagctgcagcggcgattccaggctgcaaggcagccgccactctacgggcgtgaccttgtgtggccgctgccccctgctgtgctgcagcccttccaggacacctgccacgcactcttctgcaggtggcgggcccggcagctggtgaagaacatccccccttcagacatgccccagatcaaggccaaggtggccgccatgggggccctgcaagggcttcgtcaggactggggctgccgacgggcctgggcccgagactacctgtcctctgccactgacaatcccacagcatcaagcctgtttgctcagcgactaaagacacttcgggacaaagatggcttcggggctgtgctcttttcaagccatgtccgcaaggtgaaccgcttccacaagatccggaaccgggccctcctgctcacagaccagcacctctacaagctggaccctgaccggcagtaccgggtgatgcgggccgtgccccttgaggcggtgacggggctgagcgtgaccagcggaggagaccagctggtggtgctgcacgcccgcggccaggacgacctcgtggtgtgcctgcaccgctcccggccgccattggacaaccgcgttggggagctggtgggcgtgctggccgcacactgccagggggagggccgcaccctggaggttcgcgtctccgactgcatcccactaagccatcgcggggtccggcgcctcatctccgtggagcccaggccggagcagccagagcccgatttccgctgcgctcgcggctccttcaccctgctctggcccagccgctgagcgcccgcacccgccgcaccccgaggccgccaattgtccgccccgccagcgctgcaaataaaccttctgagtcagccaaaaaaaaaaaaaaaaaa

SEQ ID NO: 1768 - DNA, 2565 bp, Homo sapien
gagctagtgacaggaggggccgggctggtacttcaggcgcccaggccggcggggcgcgctccggcggctcctgtcagcggcgggtgcggcggatcccagggcagccttcgggcggcggcgctgcctggtgcgtcgcggcgtggtcctccggcggctgtccggggcggtaggagttggctgcgggatgtgctcagccggggagctgctgcggggcggcgacggcggggaacgcgacgaggacggggacgcgctggcggagcgggaggcggcagggaccgagtgggatcccggggcgagccagcggcggcgcggacagcggcagaaggagagcgagcaggatgttgaagactcacagaaccacactggtgagccggttggagatgactacaagaaaatgggaacactttttggtgaactgaacaaaaaccttatcaacatgggcttcacaaggatgtattttggagaacgaatagtggaaccagtaatagtcattttcttttgggttatgctgtggttccttggcctgcaagcccttggactagttgctgttctttgccttgttattatttatgtgcaacagtaaaacatggccgaattgaattgtttgacatttggtagccatatatgtaattgaagaagttatatatttcactttttgacaaccgaaaaagtttgccttgtttcaaatcatgtgctggctgttttgtaagtaaatttatacatggatgtcacttaaaactaaactcttgatcataacagggttgaatatatattttgaatatacattagcttattcaaaactcttgtttcactactgtgatctctgtctcctttatacacctctatccccatgccaaatcttaagtaacaccaccagaaagtgaacagggaaaataacaggacatggaattcaaatcaagcaatatagttcttataaagagttccaataaaacatttcagaagaaaaagtatgaaacaagctaaaagtaagtttcacttagaaaacttctccccactcacactccccaccaaataatctcatattatttgggaaatatttggatttcaattgtccctacccagcctaaactaaggtaaatgataattagcatacactaccttaatattgtgatgaaaatcagtaaagatagaacgttttctaaaggtcaaaaataatatatttattattactggggaaagctcccaggttaaatataacttttttaaaatgtaacatttggacctagacctactttaatatatcatttgaagtttcagacaattttggtgctaattactttttgtgagtttttaaagtctcatagcctagttgactgcaccctatggtaatgccatattttcttgtatctaacaagttgcatattttttcctagagagacattttcagtgtatttttttttagaaatttataattttatagttctttcataacacttattctgagttttgaaacaatgtatttcctatcttgacatggattttttcacaaaaaatttgtattttactgttgttttcaggaaaaaaatcagatcatttttctttgatatctatatcagaaaggtacaatattaacagtataaaaccaaatgcttaaatttggaacttagccaattttgataatctttttctaaggctaaagtcacatcagtaattggctagccatgttattaaggtgtcttaattcagcattttcaggttttatattgaaatacgcatttctttaaatattctttgaaaatggagaatggctttagtgatattttgggttttgttagagaacctaaaatctttacactttcatctcaaagattataaaggaaaggggggtagttaagatttagaattcaagttaaatttcagaaattggggcagtcaggcatttgtatctttggtagggcaacaagtaaaacatgtagagtgcttgctatcccacttcataaagcttttacccaatcttatttctaaacctctgtgcattcttagtgtcttctcattctgaaacagaaaataaggaaaaacatttaacttagttttctaaaatcagataatcctaaacaaaaatgttagtcagggtcactaaaaagtattgcacatttatataaatacagtccttttaaaatttgacttttaaaaaacaaaagactttgtacgatattgtgtttttattgcttttgcaatatttttatagtagcctttatgaactcagtataagtgcaagttgtttgaaaaggtgtttttattagtgcacaatagaattgtgaggttttcaatagatgtcatgagattttgtatatctacataaaatatcagtacatttttttctaatgctactggaaattttacttttcctttgcaacacataaatgatatgatgtacaaaataacagctctggttccaccagtacctaatgttgaaaacatttttaaagtaatttttaatactaactatttagtatactgtcagtactgtacatctgcacactggtgttaatagggtatatattaaattatataaagaaataaaaaaaagaaaaaaaaaaaaaa

SEQ ID NO: 1769 - protein, 132 aa, Homo sapien
MCSAGELLRGGDGGERDEDGDALAEREAAGTEWDPGASQRRRGQRQKESEQDVEDSQNHTGEPVGDDYKKMGTLFGELNKNLINMGFTRMYFGERIVEPVIVIFFWVMLWFLGLQALGLVAVLCLVIIYVQQ

SEQ ID NO: 1770 - DNA, 1225 bp, Homo sapien
ggaacgaggccgcgaccccgccttcggcgctcggctcgcaggatggatcccgtacccgggacagactcggcgccgctggctggcctggcctggtcgtcggcctctgcacccccgccgcgggggttcagcgcgatctcctgcaccgtcgagggggcacccgccagctttggcaagagcttcgcgcagaaatctggctacttcctgtgccttagttctctgggcagcctagagaacccgcaggagaacgtggtggccgatatccagatcgtggtggacaagagccccctgccgctgggcttctcccccgtctgcgaccccatggattccaaggcctctgtgtccaagaagaaacgcatgtgtgtgaagctgttgcccctgggagccacggacacggctgtgtttgatgtccggctgagtgggaagaccaagacagtgcctggataccttcgaataggggacatgggcggctttgccatctggtgcaagaaggccaaggccccgaggccagtgcccaagccccgaggtctcagccgggacatgcagggcctctctctggatgcagccagccagccaagtaagggcggcctcctggagcggacagcgtcaaggctgggctctcgggcatccactctgcggaggaatgactccatctacgaggcctccagcctctatggcatctcagccatggatggggttcccttcacactccacccacgatttgagggcaagagctgcagccccctggccttctctgcttttggggacctgaccatcaagtctctggcggacattgaggaggagtataactacggcttcgtggtggagaagaccgcggctgcccgcctgccccccagcgtctcatagtccctcacccttccgcggaaagagcccccttactccacctccccgccagcctggggccaccccccctcactgcatcctggggccacccccactcactgcatcctgggaaccttcgccctgcaaggcgtttgctatcttcagccactgggcggagctgcagccctggaggagggggcgggtcgaggctgcgtggtgatggggtctccgcccccacgccctgccgggcagggctggagctggacagaagccagtgcctttaagtcatttgtgtcaaaaccctctggggtccggaggctgtgcgggtgtcctcctggcaataaacactacccggttctcgcaaaaaaaaaaaaaaaaaaaaaaa

SEQ ID NO: 1771 - protein, 273 aa, Homo sapien
MDPVPGTDSAPLAGLAWSSASAPPPRGFSAISCTVEGAPASFGKSFAQKSGYFLCLSSLGSLENPQENVVADIQIVVDKSPLPLGFSPVCDPMDSKASVSKKKRMCVKLLPLGATDTAVFDVRLSGKTKTVPGYLRIGDMGGFAIWCKKAKAPRPVPKPRGLSRDMQGLSLDAASQPSKGGLLERTASRLGSRASTLRRNDSIYEASSLYGISAMDGVPFTLHPRFEGKSCSPLAFSAFGDLTIKSLADIEEEYNYGFVVEKTAAARLPPSVS

SEQ ID NO: 1772 - DNA, 1020 bp, Homo sapien
  Unsure 248: Unknown base
  Unsure 1004: Unknown base
  Unsure 1014: Unknown base
ttcggcagagcccttgcgcgctcttgaatacctgckttctgtagcgctagttctcttcaagatttgcttagtgtcatttcatttcggtttcttttctcgccatgtttttctgtcggaattacggttcgttttggttctatgtactctctaaaatgttatcgtttttcatttgtctactaattttcgtgcatttgttactactgagtttcttaatatctgactggcctccgcccacgggctctgcagancataaaatactcaggctgatggtagtgcagagactctccctccttgatcagcgcaaacgttggtctgaggcttgagggatggagcaacattttcttggctgtgtgaagcgggcttgggattccgcagaggtggcgccagagccccagcctccacctattgtgagttcagaagatcgtgggccgtggcctcttcctttgtatccagtactaggagagtactcactggacagctgtgatttgggactgctttccagcccttgctggcggctgcccggagtctactggcaaaacggactctctcctggagtccagagcaccttggaaccaagtacagcgaagcccactgagttcagttggccggggacacagaagcagcaagargcacccgtagaakargtggggcaggcagargaacccgacagactcaggctccrgcagcttccctggagcagtcctctccatccytgggacagacagcaggacaccgaggtctgtgacagcgggtgccttttggaacgccgccatcctcctgccctccagccgtggcgccacctcccgggtttctcagactgcctggagtggattcttcgcgttggttttgccgcgttctctgtactctgggcgtgctgttcacggatctgtggagctaagcagccttagatagcagcagaaggctttttggattctcctccttgaaaagattctcagttaccaaacgtctccacctagaaaataaaaatacattaagatgttganaaaaaaaaanaaaaaa

SEQ ID NO: 1773 - protein, 56 aa, Homo sapien
  unsure 32: unknown amino acid
MLSFFICLLIFVHLLLLSFLISDWPPPTGSAXHKILRLMVVQRLSLLDQRKRWSEA

SEQ ID NO: 1774 - DNA, 1027 bp, Homo sapien
gaatctctcgcgggcagcagggcgcgcgctgcacgcacagtactaggtcaggtggtgctcccgggtgaggagctgctcctgccggaacaggaggacgcggaaggccctgggggtgcagtggagcgaccgttgagcctgaatgctagagcgtgctcgcgggtgcgcgtttgtatgcggtccgggccttcgacgctgtggggaccgcctgctggtcaccaagtgcggccgcctccgtcacaaggagcccggcagtggaggcggcggcggtgtttactgggtggactctcagcagaagcggtatgttccagtaaaaggagaccatgtgattggcatagtgacagctaaatctggagatatattcaaagttgatgttggagggagtgagccagcttctttgtcttacttgtcatttgaaggtgcaactaaaagaaacagaccaaatgtgcaggttggagatctcatctatggccagtttgtggttgctaataaagacatggaaccagagatggtctgtattgacagctgtggacgagccaatggaatgggtgtcattggacaggatggtctgctttttaaagtgactctgggcttaattagaaagctattagctccagattgtgaaatcatacaggaagtgggaaaactctatccactggagatagtatttggaatgaatggaagaatatgggttaaggcaaaaaccatccagcagactttaattttggcaaacattttagaagcttgtgaacacatgacgtcagatcaaagaaaacagatcttctccagattggcagaaagttgatataggtggacttttttacaggtcagttgaggcaaaaaactatgggttttttcaggtgaacctcccccatttaaatactcagaagataaggtgtgaatgtatgtattattagagtccgaaagtatttttataagttactggttttcacccacgcttttgtgggagagaaaatcattgcaaaatcattttttttgttcggtacaataaagtttactaaaaaacaaa

SEQ ID NO: 1775 - protein, 220 aa, Homo sapien
MLERARGCAFVCGPGLRRCGDRLLVTKCGRLRHKEPGSGGGGGVYWVDSQQKRYVPVKGDHVIGIVTAKSGDIFKVDVGGSEPASLSYLSFEGATKRNRPNVQVGDLIYGQFVVANKDMEPEMVCIDSCGRANGMGVIGQDGLLFKVTLGLIRKLLAPDCEIIQEVGKLYPLEIVFGMNGRIWVKAKTIQQTLILANILEACEHMTSDQRKQIFSRLAES

SEQ ID NO: 1776 - DNA, 1066 bp, Homo sapien
gaattcggcacgagcaaatgttgaaccaattatgttttggtggtggtgttcttagctgttgaatcctgaatggtttataaagtgaactagctggcttaatgcagccagcgttctgggcagcagaacatattcattcttactgtaaattctatttgctgcttccaaaggtgatgattttcaagcagacatgttctatatggtctgtgttttaggatctggtgcccagcctctatcagagcttgcctacctggcaaagctgcctacccttcaagtgggaaaatataatccactgtttaacaaggctcaccctctccaccctgtcctaacgaccttttgtgaatgtgctgtgatattttcttgctcaatagcaaggtggtagctctgctttcattttaagaaagtggaggctgagggcattgtatcaatactgttgcaactccaagaagttttccttgtaaaattaaaggaaagatcttgttattgattaaccattttcttatgccttgctattgacatattcatgctctttctacgtctagtggctgaaaatgtttgcatttgttcatttgactaatggtgtgatttttgkyycwatattattagacctgtaatgttttaaaatgtattttattaaatttggactggatgtatgkcctctagcaatacgaggtactttctaaactattaagggaggggttgtaycctcatgttgagataagatgatggtcgtttaaattttgcaattttttttggcctgcagggatattttgtgtttatgtgtccaaaaaaggaataaattggcattcttgtgccaaaagttgtttttcctgtcaattgtctaataagtatgcagtacactgtaatggcaacatacatggttgctttataaaaacagtttcctcagtatgagaaattttacaaagaacagtggaaaaactttgtgtttttaactcttgggtctccctatttttaaaaattgctatttggtatacaattattatgtgtcaattaaaactaaaataaaacttttaaaaaaraaaaaaaaaaaaaaaaaaaaaaactcgta

SEQ ID NO: 1777 - protein, 63 aa, Homo sapien [sequence omitted]

SEQ ID NO: 1778 - DNA, 3349 bp, Homo sapien
ggggagatccggctagaggggaggctctgacatctccttccttcctggttcctgcagcagctgctgccactgctcagcgcggtgaggagggagccggtgactcggagacggtgactcagaggcagagcggcgcaagggccaaggagtactggcgtccatggaccctggggaccccgtcaggagcaggtgacatccttccccttccaccctgctccctgctctacatccccagcagggagtggcctctcccttctccatggacttccaagagagggacccgcccttcctgcctgagagcgctcagtcctcaaagcccagcagtgctcagcaggcctctgagctgtgggaggtggtggaggagcctcgggtcaggctggggacagagggtgtcatgcctgagaggcaggaaggtcacctgctcaagaggaggaagtggcctctgaagggctggcacaagagatactttgtgctcgaggacgggatccttcattatgcaacaacccggcaagacatcaccaaggggaagctccatggctccatcgatgtccggctgtcggtcatgtccatcaacaaaaaggcccagcgcattgaccttgacactgaagacaacatctaccacctcaagatcaaatcccaggacctattccagagctgggtggcgcagctgcgtgcccaccgcctagcccaccgcctggacatgccccgtggctcactgcccagtactgctcaccggaaggttcctggtgcccagcttccaacagcagctactgcctcagccctacctgggcttggaccgcgggagaaagtgtcttcctggctgagggacagtgatgggctggaccgctgctctcatgagctctctgagtgtcaggggaagctccaggaactacacaggctcctccagagcctggagtccctgcaccgaatcccctcagcccctgttatccccacacaccaggcctcagtgacaaccgaaagacccaagaaggggaaacggacaagccgcatgtggtgcacccagagctttgccaaggatgacaccattggacgggttggtcgtctccatggctctgttcccaacctgtctcgctacctggagtctcgggactcctcgggcacccgtgggctgccacccacagactatgcccacctgcagcgcagcttctgggccctggcccagaaggtgcacagctccctcagcagcgtcctggccgccctcaccatggaacgggaccaactgagggacatgcaccagggctcagagttgtcaagaatgggggtctctgaggcctccactggccagaggcgcctccactcactgtccacctcctccgacaccacggcggactctttcagctccctcaaccctgaggagcaagaagctctgtacatgaaggggcgcgagctcaccccccagctatcgcagaccagcatcctgtcccttgctgattcccacacggagttcttcgatgcctgcgaggttctcctctccgccagctcttctgagaatgagggctcagaggaggaggagtcctgtaccagtgaaatcaccaccagcctgtctgaggagatgctggacctcaggggagctgagcgctgtcagaaaggggggtgtgttccagggagacccatggggccaccccgccgtcgctgcctgccggcggccagcgggcctggggctgacgtgagcctgtggaacattctgcgcaacaacatcggcaaagacctgtccaaggtgtcaatgcctgtgcagctcaacgagccgctcaacactctgcagcggctctgcgaggagctggagtacagcagcctcctggaccaggccagccgcatcgccgacccctgcgagcgcatggtgtacatcgcagcctttgctgtctcggcctactcctccacataccaccgagccggctgcaagcccttcaaccctgtcctgggggagacctacgagtgtgagcggcctgaccgaggcttccgcttcatcagtgagcaggtctcccaccacccccctatctcggcctgccatgcagagtctgagaacttcgccttctggcaagatatgaagtggaagaacaagttctggggcaaatccctggagattgtgcctgtgggaacagtcaacgtcagcctgcccaggtttggggaccactttgagtggaacaaggtgacatcctgcattcacaatgtcctgagtggtcagcgctggatcgagcactatggggaggtgctcatccgaaacacacaggacagctcctgccactgcaagatcaccttctgcaaggccaagtactggagttccaatgtccacgaggtgcagggcgctgtgctcagtcggagtggccgtgtcctccaccgactctttgggaagtggcacgaggggctgtaccggggacccacgccaggtggccagtgcatctggaaacccaactcaatgccccccgaccatgagcgaaacttcggcttcacccagtttgccttggagctgaatgagctgacagcagagctgaaacggtcgctgccttccaccgacacgagactccggccagaccagaggtacctggaggaggggaacatacaggccgctgaggcccagaagagaaggatcgagcagctgcagcgagacaggcgcaaagtcatggaggaaaacaacatcgtacaccaggctcgcttcttcaggcggcagacggatagcagcgggaaagagtggtgggtgaccaacaatacctactggaggctgcgggccgagccaggctatgggaacatggatggggccgtgctctggtagccctggccccgggggcaggaggctctggttcctcactcctcctgcctccaccccctaccatggacacatgggtgaggccgggctccccgcctcactgcccttctgcccatctccagcatcttcttccccttccctggccctgcagggccttctccagctccctttggttagtccctggccatccctcctgtcctggatcccttctccctaactgcaaaatgcctgcagcttccagctccttcgtccctgatcctcaagcggttccctcccgtttcagctcagcggatcccccagagtggaggaggcctctccatgaggaggggagcagcccaaggcacctgtcctctgacccaccggcagcgagtgcgcaggtgtgagtgtaagttcatgtaggagagtgtatgcgtgtgcgcctgtgccctgcttgcaggcaagcagggctccctcatgtagccccgccttccccctgctgggggtccaccacatcgctgctctttctcacagtctgcctctgatgagggcgaattgctatgacattccaagctccaataaagactgtcccag

SEQ ID NO: 1779 - protein, 842 aa, Homo sapien [sequence omitted]

SEQ ID NO: 1780 - DNA, 1014 bp, Homo sapien
agcggaaggggcctttcggaacgatttggaacgaaaggaagtggaagaaacgcggaaccatggccgctgtggttgctgtttgcggtggtctagggaggaagaagttgacacacttggtaacggctgctgtcagccttacacatcccgggactcacacggtgctttggagaagaggttgttcacaacaggtatccagcaatgaggacctgcccatttcaatggaaaatccttataaagaacctcttaagaaatgtatcttgtgtggaaagcatgtagattataagaatgtacagcttttgtcccagtttgtttctccatttactggatgcatttatggaaggcacattacaggtctttgtgggaagaaacagaaagaaatcacaaaagcaattaagagagctcaaataatggggtttatgccagttacatacaaggatcctgcatatctcaaggaccctaaagtttgtaacatcagatatcgggaataaattctatcacgttaccactaataaacttattttacagtaagtggttgtatgatgccaatactgactcaaaccaacctttggatagaaaagtgtttgaggagtgaggtaaagaatgacacttccccttcataccaatgtccattaagcagattgcttatttaaaatgttaacactcatcacattttatctatgttgaataaaagtggttctgtgtgattgtcatttatatctgatccccaaatagctcatacaataatccattcaatagaatggaattaaaactgttcagaatgattttccaactagcaaatataagtatgcctggttaagatatcttccctttgtagaaatgttacattgggatggatagtggtgctgtcacagaaggacaaaatattcctagacgagtctatcctcaaaccagtagtgtcttttacatgaagagatgatttacacctaatagacattgaatatgatagacatacatgtatatatgtatcagttctgagttccactggcctatccc

SEQ ID NO: 1781 - protein, 142 aa, Homo sapien
MAAVVAVCGGLGRKKLTHLVTAAVSLTHPGTHTVLWRRGCSQQVSSNEDLPISMENPYKEPLKKCILCGKHVDYKNVQLLSQFVSPFTGCIYGRHITGLCGKKQKEITKAIKRAQIMGFMPVTYKDPAYLKDPKVCNIRYRE

SEQ ID NO: 1782 - DNA, 2751 bp, Homo sapien
tatgttaaagtctgggacatgttaaaaggaggacaattgctagtatctttgaaaaatcatcacaaaaccgtgacatgtttatgtctaagcagctctggacagaggttactttctggctcactggataggaaggtgaaagtatacagcacaacttcctacaaagtagtccacagttttgattatgcagcttcaattttgagtcttgcccttgcacatgaagatgagacaatagttgtaggaatgaccaatggaatactgagtgttaaacatcggaaatctgaagcaaagaaggaatcacttcccagaagaagaaggcctgcatatcgaacctttattaaaggaaaaaattacatgaagcaacgggatgacattttgattaacaggccagcaaagaagcacctagaattgtatgacagggatctgaaacattttcggatctctaaggcactcgatagagttcttggtcccacttgtacaataaagacacccgagattacggtgtccatcataaaggagttaaatcgaagaggagtccttgcaaatgcgcttgcaggtcgggatgagaaggaaatcagtcatgttcttaattttttgataaggaatctttctcagccaagatttgctcctgttttaatcaatgctgctgaaataattattgatatatatctgcctgtaattggtcagtcccctgtagttgataaaaagtttttactacttcaaggacttgtagaaaaagagattgattaccaaagagaattgttagaaaccttggggatgatggatatgctttttgccaccatgagaaggaaggaaggcacttctgtgttggaacacacatctgatggatttccagagaataagaagatagaatcatagtgtctgctaaataagacatataaggactctgaagttggaatagatttgactgtattaaatgttggcgagagactctctttgatacattaaaaaaactgtttgcagaagcagttctgtggaagagactggaataattatggccggaaaacaagtacccgttttaagtaagacatggttttccatgtaatattttgaattatagcatcttcacctagaagatctcaattgtcttagtcacagagtaggtttatctgggatggatattaattttaatacaggagtgttctgtatcaacatttgggttggtattcagatgggaattcaaatatgaatcctctctggagagggtccaactgggaatcctgctaaaggagcaaagccttgtattacctctggaagacaacaaaaacaattggcaacaacaaaaagcctctttcttgactttaatcagtgcctttgggatttctgggcccttgcttagcttgcttcctgtctccttgatatctacacttgtcttagatcacatgccctgcttcagctggtaatgggactgcatcggttccaagtgtggcaagtaagttttcggctctgaagaactgacactagctagatttgtattcagagtgtgagagcaagctctacagatagaccttattggactacttttttttttttcttcatgcagcctttctaccaagttttcaccttgtttcaggtcagaggaatgatagaatttgtcatttttcttacaacagcctttcagactattcttcatatgtttcaagctaatcttgtagctaagctacctaatcctctgaaaactgttttctctgatttgtatttagattcctccccccattattcacaatcatattgtatttcggaaccccaatgcagagcagtttgctttgaaaaatagttgtttttaaaagtttaatgtaaataattattttttagaagttttttttttttttttaaagacagggtctcgctttatcgcccaggctggagtacagtgatgcaatctcagtccactgcaacctctgccctcccgggtttaagcagttctcctgcctcagcctcctgagtagctgggattacaggtgtgccccaccacgcctggctaatttttgtagttttagtagagacggggtttcaccttaccgggctggtctaaaactcctgacctcaagtgatctacctgcctctgcctcccgaagtgcttggattacaggtgtgagccactgtgtccagcctgtaactattatttttttataaagagagattcttattttcttggctttttgatgtatctgttcctgatagataatcattggctagtaactcctagtacactggtttcacagttgctacctctcctgcttttctctaattattacgccaactcaagtagttaaaaatcagtaagaaaaatgtcttgagctagaagaacccatagaggaagattttgtaatgcgaatctcctctcataattttagttctgtaaattcagggtttttttttgtttttttgttttttttaagccgaaaaaatgcttaatatgttccagtaatggtattaagtaaaaattaaataaacgtattaagtttaacatattaaattaatttaacatttagactaacattaacatttaaattaatatgttaagtgaatatacttaatatattctagtacaggtatgcttggaaatagggcgtttccttttcatgaattgatttcgtacagcacagtggcttataaggaaccagcagtgtttttccctgagtaattatgaacttagtcaagatcagaagctgggttttggggttgagaagagttcatttatttaaataaagtttctatttaaaaaccttt

SEQ ID NO: 1783 - protein, 285 aa, Homo sapien
MLKGGQLLVSLKNHHKTVTCLCLSSSGQRLLSGSLDRKVKVYSTTSYKVVHSFDYAASILSLALAHEDETIVVGMTNGILSVKHRKSEAKKESLPRRRRPAYRTFIKGKNYMKQRDDILINRPAKKHLELYDRDLKHFRISKALDRVLGPTCTIKTPEITVSIIKELNRRGVLANALAGRDEKEISHVLNFLIRNLSQPRFAPVLINAAEIIIDIYLPVIGQSPVVDKKFLLLQGLVEKEIDYQRELLETLGMMDMLFATMRRKEGTSVLEHTSDGFPENKKIES

SEQ ID NO: 1784 - DNA, 3151 bp, Homo sapien
cgggcccggggtccttcccgcctccgcggccgccggccgctttgtttcccctgcctctgcgcttcgggcgactcgagagggtctcccgccggggttgcgaaggggacgcggcggcagaagggcggccgaccccgccgggactcacagggacccaggagtccggccgccgggagggccgcgtgaggagagcgaagagggagcccgagctctgcggccccgggtggcgggccgggggcgcccgtgagcagagacctccccgtcgacggggggcgatgttcccctcacccgtgggctcttcgggcagccagggcatcccgccgctgggacctggacccgctcagtgggcacccctcaggctgctccatggagaccctgtgccctgcgccccgcctggcagtgccggcgtccccgcgagggtcgccctgctcccccacgccccggaagccgtgtcgggggacccaggaattctctccgctgtgcctgcgtgccctcgccttctgcgcccttgccaagccccgggcgtcctctctgggcccggggcctggggagctggcggcgcggtccccagtgctgcggggccctcaggcccccctgcgccctggcggctgggccccggatggcctgaagcacctctgggcaccgaccgggcggcccggcgttcctaacaccgccgccggcgaggatgcggacgtcgcagcgtgcccccgccgcggagaggaggaagagggcggaggcggtttcccgcacttcggcgttcgctcctgtgcacctccgggccgctgccctgcgcccccgcaccctcgggaatctacgaccagcttcgcctcggccccgcctcgcccggccccgggtctcgagcctcagcgtggcccagccgccagcccgcctcaggaacccagttcccggcctccgtcgccacctgcgggcctctccaccgagcccgcgggtcccgggacggcgccgcggccgttcctgcccggccagcctgccgaagtcgatggaaaccccccgccggccgcccccgaggctccagcggccagcccctcgacggccagcccggctccggccgcacccggagatctccgccaggaacatttcgatcgtctgatccgccggtcgaaactttggtgttacgcgaagggcttcgccttggacactccgagtttgcgccgggggccagagcggccgcctgcgaaagggccggctcggggagccgccaagaaacgccggctgccggcgccccctccgcgcaccgcgcagccccgccgccctgcaccgacgctccccaccacgagcaccttcagcctcctcaactgcttcccctgccccccggccctggtggtgggggaagacggagacctaaagccggcatcctcgcttcgcctccagggagactctaagcccccgcccgcccacccgctgtggaggtggcagatggggggtcccgctgtccctgagccccctggcctcaaattctgggggatcaacatggatgaaagctgaccgtgggacttctgccaaaggggaaaagttgggaccatggccaaaccgcgggcttgaggagggagccccgtttctcacatttgtccccttcctttacattttaggagctgtgggcagagggacctaaataacagtgatcttcattcaagcacctaagttttcggggtgacagtccctccccctcatcctttgcagaggaacccagggctggagtcgggagaaggctgatgacatagattccaatccctgcctccttccatctcggaccgttggaggcagggcctgcaccccagtgggagcaaaggaggccaccgctcaaagacagcccctcacccaaaaaaaaggggagaagagagagacctcggtgatggacaaaccggttgttactgtgtctgtgggcgagcctggggtgcggggctgtggtgggggtggggagatgattggcagctccctgggggcatcccccacccccactgtccaggcctttaaccctttgctcccctcaggccttccctaacgctccaagcaccgctggagcctttaatgggtgagggaacttgggtaagaggaagatcacccccttcctgtcccctttctaggccccctcaagtgcaggtgacccttaattggtgagatcttcagcctcagccgccgacctttcccttttgtccagttttggagttcccgttttttccttgtttgctttccgagtgtaaggtctggccggtgagaaagatttcccccaaccttgattaatcagccccctcccccaacttacttcccttaggacgggtagggctgagggacctcctctcctggaaagtgcttactttgcctggggaaggggctagacactgtcccagggaaagtaatagaaggtggaagaaatcaataaaatcagaccaaacaagtcgcctttcgagggcctccaccgatttatggatgagagggggtggaggtggaaggcaggcccaagtccattctttggacacccaaactcagcccccttaaagagtggaaacaaaacaagctgcactttgcagaggtggtaaatgaaaggactcttggcctaacttcaagagtcccctggggtttgaaggggcaaagtttgagtctggatggaacctgggctgaggtaccttaagcttccccccgcaacaccccagcctcagggattgcgggagttgtcagagatctgatggatccgaaaggggcagggccaggggattaggtttggggtcagaggttctgttttccaggggaggggtgagataggcctggatcatgccctctgccatgccctccagctaggaggatcttgagtcagagaggattggaagtgctttctcctccacccaggtgaggtcaggggagcttaggtcttagggagatggcaagttgaggtatgaagggaagctggggcttttggagctgccgaacaactgagggacccagtgcgccttccatcccgcactagtgaatagcgccccctcttcccccgaaaacgaggtgcgagaggaacaattcccacgctggggaaggacttgtctccttttctgtgaaaatgctttgtaaaaagttgttattgtttgcatagagcagattcttgagaaaaactgttttggaccataaaagttttgtttgtttt

SEQ ID NO: 1785 - protein, 379 aa, Homo sapien
METLCPAPRLAVPASPRGSPCSPTPRKPCRGTQEFSPLCLRALAFCALAKPRASSLGPGPGELAARSPVLRGPQAPLRPGGWAPDGLKHLWAPTGRPGVPNTAAGEDADVAACPRRGEEEEGGGGFPHFGVRSCAPPGRCPAPPHPRESTTSFASAPPRPAPGLEPQRGPAASPPQEPSSRPPSPPAGLSTEPAGPGTAPRPFLPGQPAEVDGNPPPAAPEAPAASPSTASPAPAAPGDLRQEHFDRLIRRSKLWCYAKGFALDTPSLRRGPERPPAKGPARGAAKKRRLPAPPPRTAQPRRPAPTLPTTSTFSLLNCFPCPPALVVGEDGDLKPASSLRLQGDSKPPPAHPLWRWQMGGPAVPEPPGLKFWGINMDES

SEQ ID NO: 1786 - DNA, 1201 bp, Homo sapien
cgcggttcggtcggctgcagcgctacttttggtccggggtcggcagggaggccgcggctaccgcatcacagctgacgtgaggactacgtggggccgctgccggctccgggttgctgggcggcggcgccgctgctgagcggcggtcgggctcgccgtctccacctcctcgcgtccgtaatcagtgacgaggtccgctacgtaaatccctttgcggcggacaaatgaccatggaaacagttgaatcccagcatgatggaagtataacagcttctttgacagagagcaagtctgctcatgtgcagactcagactggccaaaattcaatccctgctttagctcaggtagcagcaattgcagagacagatgaatctgcagaatcagaaggtgtaattgattctcataaacgtagagaaatcctttcacgaagaccctcttataggaaaatactgaatgaactgtcctctgatgtgcctggtgttcccaagattgaagaagagagatcagaggaagaaggaacaccacctagtattgctaccatggcagtaccaactagcatatatcagactagcacggggcaatacagtatgtatgctgcaattcgatatgatacagtgctagctttaagtcttctctagttatattgaagcaactcaggttttggcattaaattgttccattttaaaatgcatcattaatacctaaactgtatcatagaatgaaagtatatgttaaaaagtgagatctttgtattgacagctgtcatataattttgaaaagtaaaaattttgactgccgaatatagaagaaaattttggggtaaaaaggagaatttttcctatttacatgtttatattaatctctagtaaaacattgtttttgttgtctttatgatgcatgcgaacataaatgtctgtatttcattcttgttggcttttgttacccacaattacatactattcttactaatctgagagttttctaaagtatgttttcaatgtttcactactctctactctgttaatttgtgctacagtttttcctaaaagagaatggaaaaatgatttaattttttaaactgtagcaattggatagataattttatttgaaattttacacactgaaagctctaaataaacagatacattcacaaaaaaaaaaaaaaaaaaaaaaaaaaaaaaaaaaaaaaaaaaaaaaaaaaaaa

SEQ ID NO: 1787 - protein, 137 aa, Homo sapien
MTMETVESQHDGSITASLTESKSAHVQTQTGQNSIPALAQVAAIAETDESAESEGVIDSHKRREILSRRPSYRKILNELSSDVPGVPKIEEERSEEEGTPPSIATMAVPTSIYQTSTGQYSMYAAIRYDTVLALSLL

SEQ ID NO: 1788 - DNA, 1700 bp, Homo sapien
acatgacgggcacgccaggcgccgttgccacccgggatggcgaggcccccgagcgctccccgccctgcagtccgagctacgacctcacgggcaaggtgatgcttctgggagacacaggcgtcggcaaaacatgtttcctgatccaattcaaagacggggccttcctgtccggaaccttcatagccaccgtcggcatagacttcaggaacaaggtggtgactgtggatggcgtgagagtgaagctgcagatctgggacaccgctgggcaggaacggttccgaagcgtcacccatgcttattacagagatgctcaggccttgcttctgctgtatgacatcaccaacaaatcttctttcgacaacatcagggcctggctcactgagattcatgagtatgcccagagggacgtggtgatcatgctgctaggcaacaaggcggatatgagcagcgaaagagtgatccgttccgaagacggagagaccttggccagggagtacggtgttcccttcctggagaccagcgccaagactggcatgaatgtggagttagcctttctggccatcgccaaggaactgaaataccgggccgggcatcaggcggatgagcccagcttccagatccgagactatgtagagtcccagaagaagcgctccagctgctgctccttcatgtgaatcccagggggcagagaggaggctctggaggcacacaggatgcagccttccccctcccaggcctggcttattccaagaggctggtcttgaattcctgagctcaagcaacctgccggcctcggcctcccaaagtactgggattacacgcagaaggcaccatgcccaggctagatgtgtcttatcccaatcctttggcaggcatgcagctccacaggcgatttcttcaagcagctgaagtgtttagccctcctgggttaagagccagataaggagaaatccctttcctaggtttggaatgtgttgtgaaaaaaaagagaaatccctggctcctggagctggtgggagacaagattaagcaaacctcccctgacatgtatccctttgaccccaagctctgcctcctccctgaccacccatgccctttcctttaacttctcaaacagataccagggcctaaactgctttacctcccctcctactgagtcaggttaggtggtgggaggtcacccatttccgagttaaaccaatgcaatatgagtaaaacaaagtcatgtgggtatgtctggggtagagagaggggtagcaagttcatgtgtcctccttggtcacatatctcccaaagctccgatccctgccatgggaagtggacaggaaacatgaggtcatgacctgcaggcatctttactgcagctctgccggcctggagggggagagggggaggaagaagtatgcgctgcacatttctgaggctactgcatttgctttcaaggcagaaatcttgctctgagcagtcagcggctccagtttgggcccgataaggaagttctccgtggcctccctcaggcagagcagggaggaggctgacattgccagtctcttctggggcccaaggcaggttgcaggagatccaatcccatagacagctctgggcctcttgcatttgagtttttcagaattaaactgcagtattttggaaagcaaaaaaaaaaaaaaaaaaaaaaaaaaaaaaaaaaaaaaaaaaaaaaa

SEQ ID NO: 1789 - protein, 223 aa, Homo sapien
MTGTPGAVATRDGEAPERSPPCSPSYDLTGKVMLLGDTGVGKTCFLIQFKDGAFLSGTFIATVGIDFRNKVVTVDGVRVKLQIWDTAGQERFRSVTHAYYRDAQALLLLYDITNKSSFDNIRAWLTEIHEYAQRDVVIMLLGNKADMSSERVIRSEDGETLAREYGVPFLETSAKTGMNVELAFLAIAKELKYRAGHQADEPSFQIRDYVESQKKRSSCCSFM

SEQ ID NO: 1790 - DNA, 510 bp, Homo sapien
  Unsure 510: Unknown base
ctatcttaattcattttattctacaaaatgctactcaactgaaagtggaaatgctaacccccctcccccaaaaaaatcgcaagggaaagaagttttaatatgttctttcttccatagcagcaagctttttctaacaagctttctttagtgcaaatactgtaggcttgtattacatatagtaaaacaacaaaacaacaacaacaacaaaaaccaccaccagaaaggcttccaaacaaagctactcctcaattttcaaaactatacaaagattttgagcttgcggttctgcctggaaggtctatttaggagactctccaatgggaccatttcaccattacttaaaaaaaaaaaaaaaaaaaagtgcccagaaaggtaattaaattccccatagggccatatgaaccatatacaacttgtttgcctccagagtcttacagctgactttactccacgtcattaacatatctcaaatacagatgcacaaagcttattttctactatacaccaaan

SEQ ID NO: 1791 - DNA, 925 bp, Homo sapien
ttttttctgctaccgtgactaagatggaagcgtttttggggtcgcggtccggactttgggcggggggtccggccccaggacagttttaccgcattccgtccactcccgattccttcatggatccggcgtctgcactttacagaggtccaatcacgcggacccagaaccccatggtgaccgggacctcagtcctcggcgttaagttcgagggcggagtggtgattgccgcagacatgctgggatcctacggctccttggctcgtttccgcaacatctctcgcattatgcgagtcaacaacagtaccatgctgggtgcctctggcgactacgctgatttccagtatttgaagcaagttctcggccagatggtgattgatgaggagcttctgggagatggacacagctatagtcctagagctattcattcatggctgaccagggccatgtacagccggcgctcgaagatgaaccctttgtggaacaccatggtcatcggaggctatgctgatggagagagcttcctcggttatgtggacatgcttggtgtagcctatgaagccccttcgctggccactggttatggtgcatacttggctcagcctctgctgcgagaagttctggagaagcagccagtgctaagccagaccgaggcccgcgacttagtagaacgctgcatgcgagtgctgtactaccgagatgcccgttcttacaaccggtttcaaaccgccactgtcaccgaaaaaggtgttgaaatagagggaccattgtctacagagaccaactgggatattgcccacatgatcagtggctttgaatgaaatacagatgcattatccagaactgaagttgccctacttttaactttgaacttggctagttcaaagatagactcttcttttgtaaagtaaataaattcttcaaaatg

SEQ ID NO: 1792 - protein, 264 aa, Homo sapien [sequence omitted]

SEQ ID NO: 1793 - DNA, 649 bp, Homo sapien
ccctactgcgggtcccgctgctggcagcgctggaaactgggtggacggcatgggttggtctcaggatttgttccgcgccttgtggagatcgctgtcaagggaagtgaaagagcacgtgggcacggaccaattcgggaacaaatactactacatcccgcagtacaagaactggagaggacaaactattcgagagaaaagaattgtagaagcagcaaataaaaaagaagtagactatgaagcaggggatattccaacagaatgggaagcttggattagaagaacaagaaagactccacctactatggaggaaatactaaagaatgaaaaacacagagaagaaatcaaaataaaaagccaagatttttatgaaaaagaaaaactccttagtaaagagaccagtgaggaactcctgcctccaccagttcaaactcaaattaaaggccatgcctctgctccatactttggaaaggaagaaccctcagtggctcccagcagcactggtaaaacctttcagccaggatcctggatgccacgagatggcaagagccacaatcaatgaatgcattatggtcaaatcttttcatgtatatggatgtgactattttaacaaataaaagaagtgaaaagttaaaaaaaaaaaaaaaaaaaa

SEQ ID NO: 1794 - DNA, 1472 bp, Homo sapien
gcatgaacttgggggtcagcatgctgaggatcctcttcctcctggatgtaggaggagctcaagtgctggcaacaggcaagacccctggggctgaaattgatttcaagtacgccctcatcgggactgctgtgggtgtcgccatatctgctggcttcctggccctgaagatctgcatgatcaggaggcacttatttgacgacgactcttccgacctgaaaagcacgcctgggggcctcagtgacaccatcccgctaaagaagagagccccaaggcgaaaccacaatttctccaaaagagatgcacaggtgattgagctgtaggtgagcagtgacgtgaagaggggttctagccccgtggaaaacagcccatggttaacatctcaggatgttctgcattcaaacacccaaggctggtaatgaactttcacatggactgaatattggaggcaaataatagaaggaatagaatatacagtgcctctgtcctgaaggaaaatatcatgcctcttctggaagaaacggactgcacagaggaaggattgagcaatttagcctgcagtggaagaaggtggacaccaaaagcttcaccctgtgttggagctgttcatgcttccatgaggccatggtgtccatgtccgtggaacctaccacagaaaatggctcatgaaaaggggaatccgacccaacacacagcttcctacacactgccatcttatcaacagttaggcactactttgtagaacgattagcttcaccctcttagctgccaggagatcccttcttaaagatggactatgtgaagattcgggagtcctgaaacatggggactccgggatggtctctagccctatcgatgatgaacactggccttctggaggggaaatggcagtctgggctggcgtggtaggaagggctttggtgttcatggaatgggcctgctgctctcagaccttcaaaggatggaaccaacgaaggaccaaatgagaaagcagatgctgtgccttgcagagggccatgaatgtcagttattatttttctccttatacaattattttgtggttattattacaatgtacatggctgttgcatagaagacatgactggtggaggctgaggaaagccatgacattctacaattgccatcaggctaaggccccgtgagcatttctctcccttgtaatattaaccctgtatttctgggatcacatcacggaatattctttgcctttccactttccaggaaatctctcggactgggctaccctccttgtgtgtgatgaaagatgagctatatttcagaacaaagtgctgtgttgtcataatttgcctggactcccagggcgtctcttacccaacttgataacgatgctgttcattagcagcctttgttaactgataaccaagagcggtaatgtgatactcataagcaattttctgtgtgtaggataaaataaaccatcttgtatgggaaaa

SEQ ID NO: 1795 - protein, 105 aa, Homo sapien
MNLGVSMLRILFLLDVGGAQVLATGKTPGAEIDFKYALIGTAVGVAISAGFLALKICMIRRHLFDDDSSDLKSTPGGLSDTIPLKKRAPRRNHNFSKRDAQVIEL

SEQ ID NO: 1796 - DNA, 917 bp, Homo sapien
gtcagtcttagacgactgcgtcgtgctatgaccggactttttcttgaaaggggatgacagcatgggaggcaatggctccacatgtaaacccgacactgaaagacaaggcactctctccacagcagccccaacaactagccctgcaccctgtctctctaaccaccacaacaaaaaacatttaatccttgccttttgtgctggggttctactgacactgctgctgatagcctttatcttcctcatcataaagagctacagaaaatatcgaagggagaggcttcccatttccccaggcccattgctgagatgggtccctcttctttctggcaccatggcagatcactccaagccccaggccccagatcctcactcagatcctccagccaagctttcatccatcccaggggaatcacttacctatgccagcacaactttcaaactctcagaagaaaagagcaatcacttggctgagaaccattctgcagactttgaccccattgtctatgctcaaattaaagtaacaaactaactcagcttttccaatgaggcttgaatccatttcctctcatctcagccctatcttcacacatcactttcacttttttacaaattttggaccaccacctgtgtgaaactgcagtcggagttgtttagatgtgatctggcaatgctatccagcatctttggagaccaatggtcagtcttttcctggccagaggaaagattgatggccctcccacttgaactgacagcctgtgagccccttgggggcatagactgccttccttggacccttccaaagtgtgtggtacggagctcagtgcacagagtattcacccagcatcatgaatcaacttgggaggagtcaaccaaatgaacaatctaccaaaaatttcaaataaagtcaaaccccccac

SEQ ID NO: 1797 - protein, 155 aa, Homo sapien
MGGNGSTCKPDTERQGTLSTAAPTTSPAPCLSNHHNKKHLILAFCAGVLLTLLLIAFIFLIIKSYRKYRRERLPISPGPLLRWVPLLSGTMADHSKPQAPDPHSDPPAKLSSIPGESLTYASTTFKLSEEKSNHLAENHSADFDPIVYAQIKVTN

SEQ ID NO: 1798 - DNA, 2101 bp, Homo sapien
ggagggttttgctctttgtgtgggtgtgtgagtggctatgatcctagttgtccagctgctgcgtggagaataagtaaagcaggtctgaatgacaccaggtcgctgctgtcttgcggctgacattcaggtagagacgttcatcttcactgacggggaagatgaggccctggccaggcacacgggcaacgtggtcatcacaaactgctcggccgcccacagccgccaggcgctgtcctgcaagatggccgtggagtatgaccgcttcatcgagtccggcaggaagtggttctgccacgtggacgatgacaactacgtcaacctgcgggccctgctgcggctgctggccagctacccgcacacgcgggacgtctacgtcggcaagcccagcctggacaggcccatccaggccatggagcgggtcagcgagaacaaggtgcgtcctgtccacttctggtttgccacgggcggcgctggcttctgcatcagccgtgggctggctctgaagatgagcccgtgggccagcgggggtcacttcatgaatacggctgagcggatccggctgcctgatgactgcaccatcggctacatcgtggaggccctgctgggtgtgcccctcatccgcagcggcctcttccactcccacctggagaacctgcagcaggtgcccacctcggagctccacgagcaggtgacgctgagctacggtatgtttgaaaacaagcggaacgccgtccacgtgaaggggcccttctcggtggaggccgacccatccaggttccgctccatccactgccacctgtacccggacacaccctggtgtccccgcactgccatcttctagtggccatggctgagacccaatccctgggcgcccctggtatccaaagggcccagggaccctgttgcgctgccctggcctcggcattcgaggctcccctagggccgtgcctgtgcgtgtgcgtgtgcatgtgcgtgtgtgtgtgtgtgtactgcatgcccacccgggtagcaggctgctgggcagttctgctctgtggaggggcgggcaccagcgccacttatgtgcctctgctccgagggccagtgggctgcagggcctgcttggaggaaggatttgtgtgtcggaggccactccgagggcaattctgttaggatttttggatctttctacagctacggggctccgggctactttgcagggatgcgatgcgtaggtgcctttctcttcctgctgaccacaagctctgtgctgggggtacctgtgccctgaagtcctggcccctgtgtcatagccccaagtacgactcactgagccatgctcattgcaggggaggctgggtctgggggtgcgtgacccaatccccttcctcctggcctggacgctgtggcttaagagtaacagcagccaccgcccagttccagtggccccacgaagcccccagtggctggctgtccagctgggcaaacagtggcacccctcccagctcttctgagtggggagtcttccaggcctcctcagaggtcttccctttgcctccccaggacagggtgagtcagagctcagcatttaatctcctctccaaagtagagagcaagtcgcccacagtgggcgtgtctgtaaatattgtgacagtatttttttactgtgctgttttttttgaaaggggatgggtaaaaagtagggtgttcttgttttttgcttgggagggtgggggtgggggagggtcttattttatcttatcttttctgtggatcagaaaaaacagaagccaaactcggggtcatctttgtttttaaagctgaagtgggactgtctggcactctgtgtatttatgcgttccagcatctggaacctcccatccctgccctcctcctgtgtagctgccacctccccgctgggcccagcatggctcacctgtcccgtgggctgtgtttcttgttgtttttctctttgcaaagacatagctaggaaagcgaatgataagggaaaagttctcagggaattgaagtgttgttgctatggtgacgtccttttgctgtgaataaaggtgctctttgcagcaaaaaaaaaaaaaaaaaaaaaaaaaaaaaaaaaaaaaaa

SEQ ID NO: 1799 - protein, 250 aa, Homo sapien
MTPGRCCLAADIQVETFIFTDGEDEALARHTGNVVITNCSAAHSRQALSCKMAVEYDRFIESGRKWFCHVDDDNYVNLRALLRLLASYPHTRDVYVGKPSLDRPIQAMERVSENKVRPVHFWFATGGAGFCISRGLALKMSPWASGGHFMNTAERIRLPDDCTIGYIVEALLGVPLIRSGLFHSHLENLQQVPTSELHEQVTLSYGMFENKRNAVHVKGPFSVEADPSRFRSIHCHLYPDTPWCPRTAIF

SEQ ID NO: 1800 - DNA, 1249 bp, Homo sapien
cttctcattagcattaactagttatgcccagcttgggagagccttctttgggcttatcatttattataagcccagaaataggtgactaatcagagataaatgtatgggttgtctgtatctagttttatgcctttttttttgcctaagacgtagtcaaattaatattttaactaatacatcttagcagagtttagttaagcacaaagttaacagtgggtaggattgaatcttgaaagtaatcatgtctgtaatgtttttcatgcatgcaaaaagcacagacaaaaccactcatgccctattaataaacaaaatacagatcaaagttttcaaaagtaatcactctatttattctaaatgtctgtggctttaggaaaataccaccagctagtacttacctatttaaagatgtagaatttattatcctctaatattcttatcagttgtttccacaactttagtttactattggactttcaaaaatttaaagaattacaagtaaaattcattaaacacttgtgtgtgaatagtaatacacagtaattagtacagcatgttgcttcttcaacaaattgagttttcagggaaatcagcaagtaaatgaaatataaatttttggtaaaagtatcaaacattcatcttgcccatttttcctcttaaactttattatctaatcaaacatagttttccataagatgtaataaaatatagataaggttggaatatttgaggatccatttgtggaactgaatttaatgagacttcattggtgatacactcaatttttactgggtaattagctaataatgttggtcactgtctcacagttcaagtagctttaagatgatgtggcaaggaaaacacaaagcttttgggtaaccagcgttcttaaatgtatggtttttgaccaggtgaaccctttagaagtgatttctgttttaaaagtatgtacttaaaatacctttggctgtgatgaatgtagatcccagcagaataccaaaatcctattttttttgactgagtatttgtagatgcttaatgactgaaatgaatttggaggcactgatgaaagtgatttttttaaagttctcaggtactgttcaattatttaatgttaagtttagtatcaagatacagttgtttttaaaatgccaaaatgctgtttattatacagaatattttattacatttgcaatatctttgtatatagtgatttttttcttgataataaatggaaaaattctaaaacaaa

SEQ ID NO: 1801 - DNA, 5142 bp, Homo sapien
  Unsure 3712-3747: Unknown base
  Unsure 4297-4326: Unknown base
gtgctgccgtgacactcggccctccagtgttgcggagaggcaagagcagcgaccgcggcacctgtccgcccggagctgggacgcgggcgcccgggcggccggacgaagcgaggagggaccgccgaggtgcgcgtctgtgcggctcagcctggcgggggacgcggggagaatgtggactgggtagagatgaacgagacttttctcagatgttggatatttgcttggaaaaacgtgtgggtacgaccttggctgcccccaagtgtaactccagcactgtgaggtttcagggattggcagaggggaccaaggggaccatgaaaatggacatggaggatgcggatatgactctgtggacagaggctgagtttgaagagaagtgtacatacattgtgaacgaccacccctgggattctggtgctgatggcggtacttcggttcaggcggaggcatccttaccaaggaatctgcttttcaagtatgccaccaacagtgaagaggttattggagtgatgagtaaagaatacataccaaagggcacacgttttggacccctaataggtgaaatctacaccaatgacacagttcctaagaacgccaacaggaaatatttttggaggatctattccagaggggagcttcaccacttcattgacggctttaatgaagagaaaagcaactggatgcgctatgtgaatccagcacactctccccgggagcaaaacctggctgcgtgtcagaacgggatgaacatctacttctacaccattaagcccatccctgccaaccaggaacttcttgtgtggtattgtcgggactttgcagaaaggcttcactacccttatcccggagagctgacaatgatgaatctcacacaaacacagagcagtctaaagcaaccgagcactgagaaaaatgaactctgcccaaagaatgtcccaaagagagagtacagcgtgaaagaaatcctaaaattggactccacccctccaaggaaaggacctctaccgttctaacatttcacccctcacatcagaaaaggacctcgatgactttagaagacgtgggagccccgaaatgcccttctaccctcgggtcgtttaccccatccgggcccctctgccagaagactttttgaaagcttccctggcctacgggatcgagagacccacgtacatcactcgctcccccattccatcctccaccactccaagcccctctgcaagaagcagccccgaccaaagcctcaagagctccagccctcacagcagccctgggaatacggtgtcccctgtgggccccggctctcaagagcaccgggactcctacgcttacttgaacgcgtcctacggcacggaaggtttgggctcctaccctggctacgcacccctgccccacctcccgccagctttcatcccctcgtacaacgctcactaccccaagttcctcttgcccccctacggcatgaattgtaatggcctgagcgctgtgagcagcatgaatggcatcaacaactttggcctcttcccgaggctgtgccctgtctacagcaatctcctcggtgggggcagcctgccccaccccatgctcaaccccacttctctcccgagctcgctgccctcagatggagcccggaggttgctccagccggagcatcccagggaggtgcttgtcccggcgccccacagtgccttctcctttaccggggccgccgccagcatgaaggacaaggcctgtagccccacaagcgggtctcccacggcgggaacagccgccacggcagaacatgtggtgcagcccaaagctacctcagcagcgatggcagcccccagcagcgacgaagccatgaatctcattaaaaacaaaagaaacatgaccggctacaagacccttccctacccgctgaagaagcagaacggcaagatcaagtacgaatgcaacgtttgcgccaagactttcggccagctctccaatctgaaggtccacctgagagtgcacagtggagaacggcctttcaaatgtcagacttgcaacaagggctttactcagctcgcccacctgcagaaacactacctggtacacacgggagaaaagccacatgaatgccaggtctgccacaagagatttagcagcaccagcaatctcaagacccacctgcgactccattctggagagaaaccataccaatgcaaggtgtgccctgccaagttcacccagtttgtgcacctgaaactgcacaagcgtctgcacacccgggagcggccccacaagtgctcccagtgccacaagaactacatccatctctgtagcctcaaggttcacctgaaagggaactgcgctgcggccccggcgcctgggctgcccttggaagatctgacccgaatcaatgaagaaatcgagaagtttgacatcagtgacaatgctgaccggctcgaggacgtggaggatgacatcagtgtgatctctgtagtggagaaggaaattctggccgtggtcagaaaagagaaagaagaaactggcctgaaagtgtctttgcaaagaaacatggggaatggactcctctcctcagggtgcagcctttatgagtcatcagatctacccctcatgaagttgcctcccagcaacccactacctctggtacctgtaaaggtcaaacaagaaacagttgaaccaatggatccttaagattttcagaaaacacttattttgtttcttaagttatgacttggtgagtcagggtgcctgtaggaagtggcttgtacataatcccagctctgcaaagctctctcgacagcaaatggtttcccctcacctctggaattaaagaaggaactccaaagttactgaaatctcagggcatgaacaaggcaaaggccatatatatatatatatatatatatatatatctgtatacatattatatatacttatttacacctgtgtctatatatttgcccctgtgtattttgaatatttgtgtggacatgtttgcatagccttcccattactaagactattacctagtcataattattttttcaatgataatccttcataatttattatacaatttatcattcagaaagcaataattaaaaaagtttacaatgactggaaagattccttgtaatttgagtataaatgtatttttgtcttgtggccattctttgtagataatttctgcacatctgtataagtacctaagatttagttaaacaaatatatgacttcagtcaacctctctctctaataatggtttgaaaatgaggtttgggtaattgccaatgttggacagttgatgtgttcattcctgggatcctatcatttgaacagcattgtacataacttgggggtatgtgtgcaggattacccaagaataacttaagtagaagaaacaagaaagggaatcttgtatatttttgttgatagttcatgtttttcccccagccacaattttaccggaagggtgacaggaaggctttaccaacctgtctctccctccaaaagagcagaatcctcccaccgccctgccctccccaccgagtcctgtggccattcagagcggccacatgacttttgcatccattgtattatcagaaaatgtgaagaagaaaaaaatgccatgttttaaaaccactgcgaaaatttccccaaagcataggtggctttgtgtgtgtgcgatttgggggcttgagtctgggtggtgttttgttgnnnnnnnnnnnnnnnnnnnnnnnnnnnnnnnnnnnnaatgtcaaaattgcacaaacatggtgctctaccaggaaggattcgaggtagataggctcaggccacactttaaaaacaaacacacaaacaacaaaaaacgggtattctagtcatcttggggtaaaagcgggtaatgaacattcctatccccaacacatcaattgtattttttctgtaaaactcagattttcctcagtatttgtgtttttacattttatggttaatttaatggaagatgaaagggcattgcaaagttgttcaacaacagttacctcattgagtgtgtccagtagtgcaggaaatgatgtcttatctaatgatttgcttctctagaggagaaaccgagtaaatgtgctccagcaagatagactttgtgttattctatcttttattctgctaagcccaaagattacatgttggtgttcaaagtgtagcaaaaaatgatgtatatttataaatctatttataccactatatcatatgtatatatatttataaccacttaaattgtgagccaagccatgtaaaagatctactttttctaagggcnnnnnnnnnnnnnnnnnnnnnnnnnnnnnnctcctttctgagactttgcttaatacttggtgacctcacaatcacgtcggtatgattgggcacccttgcctactgtaagagaccctaaaaccttggtgcagtggtggggaccacaaaacaaccagggaggaagagatacatcattttttagtattaaggaccatctaagacagctctattttttttttgccactttatgattatgtggtcacacccaagtcacagaaataaaaaactgactttaccgctgcaatttttctgttttcctccttactaaatactgatacattactccaatctattttataattatatttgacattttgttcacatcaactaatgttcacctgtagaagagaacaaatttcgaataatccagggaaacccaagagccttactggtcttctgtaacttccaagactgacagctttttatgtatcagtgtttgataaacacagtccttaactgaaggtaaaccaaagcatcacgttgacattagaccaaatacttttgattcccaactactcgtttgttctttttctccttttgtgctttcccatagtgagaatttttataaagacttcttgcttctctcaccatccatccttctcttttctgcctcttacatgtgaatgttgagcccacaatcaacagtggttttattttttcctctactcaaagttaaaactgaccaaagttactggctttttactttgctagaacaacaaactatcttatgtttacatactggtttacaatgttatttatgtgcaaattgtcaaaatgtaaattaaatataaatgttcatgctttacc

SEQ ID NO: 1802 - protein, 893 aa, Homo sapien [sequence omitted]

SEQ ID NO: 1803 - DNA, 2939 bp, Homo sapien
  Unsure 2500: Unknown base
gcctaggaacattttttaaggactcagctgtggcttttagggcttggttcataccatgggggaaaaaaaagtcctaggagaaagcgacgtggctcattagtgttgcctcttcagtgctcaagccgcctggtggattcctatgacacagggggcctggaaagaaagggaaagtggatttaaaatatatatatacgtaacccaagccccataacccctaactggacaaatgaggtctgtttctttgggcctgaggctgtgcatataaagtcttattttgggactttacaaacttgtcctaactatcttgtggatagtgggctgtgacaatctggaatagagaacgttcacacttcgctcctttaaagaagcgaccccagatctgcaagggagtagattctgctatcttggcctcacagcccttcctgttgattacaaagcccgtggaagaaaacagaacacaccctcctcagttccgtctaaatgtgtttcttctgcttcaattacaccagttctggggcaaagacactgatgaaacaacacccatacctgaaaagaataaatgtgtgactttcaaatcccctttcgcagtgaaagaaacagcaaacacttaagattcagcatctgttctccagttgcactgaggaatgcactgtctcgcagcaccagctctgcagagcccttgccccagactctttgcggttttatttatatgtatttccatatttcattcctgtgtgtcactgctgcattggtgtggcagcaagtgaccaaatgctacaggtcttactatggacaccaggtcaggtgcaaccacacaaaacaaagccagttccatgagctgcctatgatatgcattgcggaagtaacattttacccagggtgtgccattgcagtgatataaatatatttttttcttagactaaatatgagctgactatctcttttgatgtgtgtacataggtgtgagtgtgtstgtatgcgtgcctgtctgtgtgcgggtgtgtgtatgtgcrtagcctcatgcttaggactacccatgaatgttgtggaatgctacacctggagagttctggttttccaccagtttcaagatgaagaactacatgatacagtggacctggagaccatccccttggaaagacaacccagagatgttcagcatcctgtatctacacgcatcctgtatctacacgtgtattttgtagctgtcacactaaccttaataagaattctacagctttggacagaggcattttcaccttaatggygaagtaatttaaaatataaatccattcaggtgacaacccatcatcaaaattacaaattttctgattgaactcatctgaatcatcagttccttgatggagagagagaaggagatggaatgtgtctggtaaccccaaatggagtacaagtagcctttgttttcctgcataaatggacttgttgaatgcgaacgaatatatgcaattcatatacttttggagatgaacgtagatatgtgtgtcagctttgagatggtgtgyccyggattaatactttgtctccccaatatcacagaaaaatacatgcccagtgactcttgaggttaaggtagttgggatgaaatggcctcaggcaatttcacattccctaattacctggaaagttctacagtaattaatatgcagctaactcctgttgccctcacaagagcatcagccttctagaatcggagctccggagtgtgaagattcagtattgatatgatatgtataccaaactccagccaacttactgccatttttcataatctgagtggctgccttgcttatcctaagctgtggttgcagaaaccgtggccatttatataagctataacatcaaatcagggaaaaatgaggaaaaaaaatagattctgaaccatttattgttgaataagtagagaaaatcatcaataaatatttattacattctgacagggtgtgtggcattgtgttctatgccagagtgacaaagttgattcacccctttttggggaccttaatatattttttaagggatgtgcctatgcattgatgcctgaaaaatatgtataaagaaatgaggttgactcttctgagcagttcatcttttccagaggtaagggtaggaggccaacttcaggatctgggtctragcccgtgggsaagccctggccgagtgagctccaatgctaactcatgtgccgatctctagagcagtgggaaactaccccgctgcaccaaatcaagtagcttcaccttgtgtatgcaggccccaagttattttttagcaatcttacgagtgaaatgttctggtgggttgaaaaacgttcttattttaaagaaaggttgtgctcgctacactgctggtgtgtgcrttctgagacctcttgtattccaatctgtgaagggatatgtgtattaatccgtacacccgtatagcctcaatatttgtctgaagacacttaaattctgacccataaggaaagttcctagangccaatattttcacttatttaacattctccaaacaacatcaagcattgatacacactgaagagtgcgtttattttttgtatcactctaagtatgttggaatatgcaaggactgtggttcaaattagaatgtataaggcatattataatttagttcatactgaaaaagaaattaacagaacattgttcggttcacacgttccaaaatttgagtgatttctggagttagacatagattttctattttgttttaatttgtcaaggtatttttcttcccttcatgaactttaggtacacataacttatgtcatttatttatggtcttttatacctagtttgtaaaattgtaaaatagcaaactaaatgcaaagagtttgcatttgaaaataataaagtagttaccgtatacaaccctgcaaaaaaaaaaaaaaaaaactcgag

SEQ ID NO: 1804 - DNA, 1607 bp, Homo sapien
aagctttcctctttgcattttggcatttgaaaactccgaagagcggtttttgttttttatttaaagaagatgatacatatgtgtacccgattcaaaactagagaatagaatttaaaacataattttcaaagtcttcaaatatgcctaaaggtaacaatgtcatcttttaattgccaatttctctaccactttcaaaaaattacttccaaggatttaatgagctccttcctttcaacagaaaatggactattttcctttcagatttactatatgctgtcactccagctttataaccgcatgtgcatacacaaacatttctttctctcttgcaggtggcacaaaccaggaaggggaaatctgtggtttaaattctttatgcctcatcctctgagtgctgaaggcttgctgtaggctgtatgctgttaatgctaatcgtgataggggtttttgcctccaactgactcctacatattagcattaacagtgtatgatgcctgttactagcattcacatggaacaaattgctgccgtgggaggatgacaaagaagcatgagtcaccctgctggataaacttagacttcaggctttatcatttttcaatctgttaatcataatctggtcactgggatgttcaaccttaaactaagttttgaaagtaaggttatttaaaagatttatcagtagtatcctaaatgcaaacattttcatttaaatgtcaagcccatgtttgtttttatcattaacagaaaatatattcatgtcattcttaattgcaggttttggcttgttcattataatgttcataaacacctttgattcaactgttagaaatgtgggctaaacacaaatttctataatatttttgtagttaaaaattagaaggactactaacctccagttatatcatggattgtctggcaacgttttttaaaagatttagaaactggtactttcccccaggtaacgattttctgttcaggcaacttcagtttaaaattaatacttttatttgactcttaaagggaaactgaaaggctatgaagctgaatttttttaatgaaatatttttaacagttagcagggtaaataacatctgacagctaatgagatattttttccatacaagataaaaagatttaatcaaaaaatttcatatttgaaatgaagtcccaaatctaggttcaagttcaatagcttagccacataatacggttgtgcgagcagagaatctacctttccacttctaagcctgtttcttcctccatatggggataatactttacaaggttgttgtgaggcttagatgagatagagaattattccataagataatcaagtgctacattaatgttatagttagattaatccaagaactagtcaccctactttattagagaagagaaaagctaatgatttgatttgcagaatatttaaggtttggatttctatgcagtttttctaaataaccatcacttacaaatatgtaaccaaacgtaattgttagtatatttaatgtaaacttgttttaacaactcttctcaacattttgtccaggttattcactgtaaccaaataaatctcatgagtctttagttgatttaaaaaa

SEQ ID NO: 1805 - protein, 64 aa, Homo sapien
MSSFLSTENGLFSFQIYYMLSLQLYNRMCIHKHFFLSCRWHKPGRGNLWFKFFMPHPLSAEGLL

SEQ ID NO: 1806 - DNA, 579 bp, Homo sapien
  Unsure 80-119: Unknown base
ggtgaaatggggatggaaaagggttatataaaaacaaataatggtaacaataatgatgaagattggagtactccatctcnnnnnnnnnnnnnnnnnnnnnnnnnnnnnnnnnnnnnnnncatgttcattatagttcattacagttacatagtccgaaggtcttacaactaatcactggtagcaataaatgcttcaggcccacatgatgctgattagttctcagttttcattcagttcacaatataaccaccattcctgccctccctgccaagggtcataaatggtgactgcctaacaacaaaatttgcagtctcatctcattttcatccagacttctggaactcaaagattaacttttgactaaccctggaatatctcttatctcacttatagcttcaggcatgtatttatatgtattcttgatagcaataccataatcaatgtgtattcctgatagtaatgctacaataaatccaaacatttcaactctgttagaatagaggtaattgtgtggtttgtgtatgggactataacagtaatattaattcccaaaatttctcctactaggaacagtgggta

SEQ ID NO: 1807 - protein, 56 aa, Homo sapien
  unsure 27: unknown amino acid
  unsure 28: unknown amino acid
  unsure 29: unknown amino acid
  unsure 30: unknown amino acid
  unsure 31: unknown amino acid
  unsure 32: unknown amino acid
  unsure 33: unknown amino acid
  unsure 34: unknown amino acid
  unsure 35: unknown amino acid
  unsure 36: unknown amino acid
  unsure 37: unknown amino acid
  unsure 38: unknown amino acid
  unsure 39: unknown amino acid
  unsure 40: unknown amino acid
GEMGMEKGYIKTNNGNNNDEDWSTPSXXXXXXXXXXXXXXMFIIVHYSYIVRRSYN

SEQ ID NO: 1808 - DNA, 1182 bp, Homo sapien
ctattttttaaaacggaggtactgaaaaagatcgggagattttctattcctctatcaatggggatttccaggcacgtgccccacccaaggcccacgcccagagcgcccgagtggcaggacaacgcccgctgacatcttcccgtcccgacggcacaggctactccgagctccgccttttagattgcaccgagagaagccagctacagcttggagtccaggccgggttttcaagcatcaagacggaagtaacagcggaaaggaagttccaaggcccgcgctgggaaaaaggtggggggaccaggggaagactcggagtgcgatggcggcgcaaattccaattgtggccaccacttccactcccggaatagtccggaacagcaagaagaggccggccagcccttcccacaatggcagcagcggcgggggctatggcgccagtaagaagaaaaaagcgtccgcttccagctttgcgcagggtatcagcatggaagccatgagtgagaataaaatggtgccctctgagtttagcacaggacctgtggaaaaagctgccaaacctttgccatttaaggatcccaactttgtgcactctggccacggtggcgcagtagctggcaagaagaacagaacctggaagaacctgaaacaaatcctcgcttctgaaagggcattgccgtggcaactgaacgatcctaactacttcagtattgatgctcctccatcctttaagccagctaagaagtattctgatgtttcaggtctgcttgccaactacacagacccccagagcaaactgcggttcagcaccattgaagagttttcctacattcggaggctgccctctgacgtcgtcaccggctacctggccctgaggaaggccacgagcatcgttccctgagccccagaaagggagatgaaatggaaagctgtttcaaaaacagactctggactcatgattttgtttcacggaaacaaactcgttctgctgtcaatctgaaaatgccagtgctgtgccttggaaagaatgtttggctttaatttaagggtttttttttttttttagtgtgtgttttccctccaagtgtgatatttcctgctgaattaaattatacttcagttgttgcctcaagtaaaggtgtttgacaagaagatacaataaaaccatacttttcatttaaaaaa

SEQ ID NO: 1809 - protein, 192 aa, Homo sapien
MAAQIPIVATTSTPGIVRNSKKRPASPSHNGSSGGGYGASKKKKASASSFAQGISMEAMSENKMVPSEFSTGPVEKAAKPLPFKDPNFVHSGHGGAVAGKKNRTWKNLKQILASERALPWQLNDPNYFSIDAPPSFKPAKKYSDVSGLLANYTDPQSKLRFSTIEEFSYIRRLPSDVVTGYLALRKATSIVP

SEQ ID NO: 1810 - DNA, 1761 bp, Homo sapien
atggctttagagatccacatgtcagaccccatgtgcctcatcgagaactttaatgagcagctgaaggttaatcaggaagctttggagatcctgtctgccattacgcaacctgtagttgtggtagcgattgtgggcctctatcgcactggcaaatcctacctgatgaacaagctggctgggaagaacaagggcttctctgttgcatctacggtgcagtctcacaccaagggaatttggatatggtgtgtgcctcatcccaactggccaaatcacacattagttctgcttgacaccgagggcctgggagatgtagagaaggctgacaacaagaatgatatccagatctttgcactggcactcttactgagcagcacctttgtgtacaatactgtgaacaaaattgatcagggtgctatcgacctactgcacaatgtgacagaactgacagatctgctcaaggcaagaaactcacccgaccttgacagggttgaagatcctgctgactctgcgagcttcttcccagacttagtgtggactctgagagatttctgcttaggcctggaaatagatgggcaacttgtcacaccagatgaatacctggagaattccctaaggccaaagcaaggtagtgatcaaagagttcaaaatttcaatttgcctcgtctgtgtatacagaagttctttccaaaaaagaaatgctttatctttgacttacctgctcaccaaaaaaagcttgcccaacttgaaacactgcctgatgatgagctagagcctgaatttgtgcaacaagtgacagaattctgttcctacatctttagccattctatgaccaagactcttccaggtggcatcatggtcaatggatctcgtctaaagaacctggtgctgacctatgtcaatgccatcagcagtggggatctgccttgcatagagaatgcagtcctggccttggctcagagagagaactcagctgcagtgcaaaaggccattgcccactatgaccagcaaatgggccagaaagtgcagctgcccatggaaaccctccaggagctgctggacctgcacaggaccagtgagagggaggccattgaagtcttcatgaaaaactctttcaaggatgtagaccaaagtttccagaaagaattggagactctactagatgcaaaacagaatgacatttgtaaacggaacctggaagcatcctcggattattgctcggctttacttaaggatatttttggtcctctagaagaagcagtgaagcagggaatttattctaagccaggaggccataatctcttcattcagaaaacagaagaactgaaggcaaagtactatcgggagcctcggaaaggaatacaggctgaagaagttctgcagaaatatttaaagtccaaggagtctgtgagtcatgcaatattacagactgaccaggctctcacagagacggaaaaaaagaagaaagaggcacaagtgaaagcagaagctgaaaaggctgaagcgcaaaggttggcggcgattcaaaggcagaacgagcaaatgatgcaggagagggagagactccatcaggaacaagtgagacaaatggagatagccaaacaaaattggctggcagagcaacagaaaatgcaggaacaacagatgcaggaacaggctgcacagctcagcacaacattccaagctcaaaatagaagccttctcagtgagctccagcacgcccagaggactgttaataacgatgatccatgtgttttactctaa

SEQ ID NO: 1811 - protein, 586 aa, Homo sapien
MALEIHMSDPMCLIENFNEQLKVNQEALEILSAITQPVVVVAIVGLYRTGKSYLMNKLAGKNKGFSVASTVQSHTKGIWIWCVPHPNWPNHTLVLLDTEGLGDVEKADNKNDIQIFALALLLSSTFVYNTVNKIDQGAIDLLHNVTELTDLLKARNSPDLDRVEDPADSASFFPDLVWTLRDFCLGLEIDGQLVTPDEYLENSLRPKQGSDQRVQNFNLPRLCIQKFFPKKKCFIFDLPAHQKKLAQLETLPDDELEPEFVQQVTEFCSYIFSHSMTKTLPGGIMVNGSRLKNLVLTYVNAISSGDLPCIENAVLALAQRENSAAVQKAIAHYDQQMGQKVQLPMETLQELLDLHRTSEREAIEVFMKNSFKDVDQSFQKELETLLDAKQNDICKRNLEASSDYCSALLKDIFGPLEEAVKQGIYSKPGGHNLFIQKTEELKAKYYREPRKGIQAEEVLQKYLKSKESVSHAILQTDQALTETEKKKKEAQVKAEAEKAEAQRLAAIQRQNEQMMQERERLHQEQVRQMEIAKQNWLAEQQKMQEQQMQEQAAQLSTTFQAQNRSLLSELQHAQRTVNNDDPCVLL

SEQ ID NO: 1812 - DNA, 6014 bp, Homo sapien
attatgggctgtgggtgccgctgagcaagatggagctgtctgcagtgggcgagcgggtcttcgcggccgaatccatcatcaaacggcggatccgaaagggacgcatcgagtacctggtgaaatggaaggggtgggcgatcaagtacagcacttgggagcccgaggagaacatcctggactcgcggctcattgcagccttcgaacaaaaggagagggagcgtgagctgtatgggcccaagaagaggggacccaaacccaaaactttcctcctgaaggcgcgggcccaggccgaggccctccgcatcagtgatgtgcatttctctgtcaagccgagcgccagtgcctcctcgcccaagctgcactccagcgcagccgtgcaccggctcaagaaggacatccgccgctgccaccgtatgtcccgccgtcccctgccccgcccggacccgcaggggggcagccccggactgcgcccgcccatttcgcccttctcggagacggtgcgcatcatcaaccgcaaggtgaagccgcgggagcccaagcggaaccgcatcatcctgaacctgaaggtgatcgacaagggcgctggcggcgggggcgccgggcagggggccggggcgctggcccgccccaaagtcccctcgcggaaccgcgttataggcaagagcaagaagttcagcgagagcgtcctgcgtacacagatccgccacatgaagttcggcgcctttgcgctgtacaagcctccgcccgcccccctggtagccccgtcccccggcaaggctgaggcctcagccccgggccctgggctacttctggccgcccccgccgccccctacgacgcccgcagctctggctcctccggctgcccctcgcctacaccacagtcctctgaccccgacgacacgccccccaagctcctccccgagaccgtgagcccatccgcccccagctggcgcgagccggaggtgctcgacctgtccctccctcccgagtcggcagccaccagcaagcgggcaccgcctgaggtcacagctgctgccggcccggcacctcccacggcccctgagcccgccggtgcctcctccgagcccgaggctggggactggcgccccgagatgtcaccctgctccaatgtggtcgtcaccgatgtcaccagcaacctcctgacggtcacaatcaaggaattctgcaaccctgaggatttcgagaaggtggctgctggggtagcaggcgccgctgggggcggtggcagcattggggcgagcaagtgagggggctccaccaaggaggggggcttgggggggccctcctgcccgaagtcatactcttgctcccaccccacccttgcccccagccctctctccctgtgctttgcttgtctcaaatggctcggtgttgacccagggatggggctgggtagttggggtcccagaaagccgggggtaggggccaccctggaatggggcaggggaagggcacaccccctgcccatgcatggtagcccactgggtggtttctggaaagccctagaaactagggttcctctgccccttccacatcccacctgtctctctagcttgcttcctgctctcctgtgcggcgtctgatttctcggtgctaacctggcagctgtggggcccttaggagccccccaccgagggtggacacagtccctttccttcctgcagatgcctaggcaggaggagggcttcctgcctgtttggcaaagtcccaggcagaggccaaggatgaggcctgactcggctcctccctccacatcagccagggcatcagaagttgggccagggcggggtcttccctgctcgattttggacgaggcctaagtagaccccctatgccctgccccagccctggctctttcctaaccccctcaacggtgggaggaactggcagagggtgcgcctggccacagcctccccgcatctaaaggccccttcagttcttgaccaaaggtgctacgagaacctgccgtggaaacttccagttgtgcgtctgccccactcgctgtgtttgtccgtgggttcatacatgcattgggtgctaggccccaggctgccgggtggcaccctttacagttcctttgaacaggggcattgaaggcctggactgcctctcgcctcagtaggcctggggaccaggcttgggtctggaggtttgctgtggaagtcaccaggcctcccctcctggcccaggtgtgctgggggcaccgtgccccccacccccctgccctcctcagggtggtcagcccaacctgtcggaccttcacttcacatcatggtggggaccgagatagagagggagaccccattccaagctccctcttcctccgggtgtttggggaggatgctgaagaatccattcccgagggcctcccggcttgtcccagcccctcttttgcttctgaccacggaggctttctcacagcccagcctgcctgaagcaaaggaggctcccgtgtcctgggcagcttctgtttccctctgctgcctgggagctgaggcacccgtgccagtggcagaggccacagccccagccttaggccaggccctgggagggcaggcaggcaaaggggagaccagagggtctgtgttctccaggagaatgagggtgttggtcccagaattgggaccggggccccgctggccagccctgggccacttcccgggtctccattgtgcgtgggtggcgtgttccaggcgtggctggagctggcttcctggctgtgctgccatgggcccctccctcagaagcacgttggcaggaggccgatcagaaccctagcgcctttggtcctaagaatgggaggctgccttccttcccaatctccctgccagggcccacagcgtggccctagccctcccctccccgggatgtagaacggggaccctcgcagggttggggcgggggctgatactcctcggcccctccctaccctgccctgtgtgttggctttgtggccgtccaagtgccaattggcttttcgcccaaataagggctggtatttctcctctgtccttggaggtgatttccccctgaccccctcccccaggtgagtgaccacctgggtgccagttacaggtgtttccagagaccatagaaatgtgttttcctgagagttcgtgtcattcgtgacttttttgtaaagaagttgtgttttcagaggtgattttatgacaggaaagtgaaagaattagttttgcaaaaaaacaaaaacaaaaaaagaggaaaaaaaaaagaaatagaaaaaaatattgtgggattcctatgggggggtggcgggggagaaagagctatttaagaaaaaatagtaacgcagtgattgcacaggtgaggtggcaatgtcaggatggggcggaggcctgggcccagctggcaggtcccctggcatcgcaggcactgtggagagggcctggacccagatctccacacccgtgcttgctcaaagggaaggacaacagcgggcccccgggagctaacccaagctgcaggtcccggcaagctgaggtttgggagggtgggggttgtcactggtgattttctccagggggctggtgagtgggcagtttggtttcttgcccccttctgttcctttcccagttgttgggccatctggtccccaccaccgccaccctatgggggagacctccctccccacgggtcaccctaaagcccacaacctctctgagcctccctggcctgaaaggggatgcaggcttcaggaggcaagaagctgggcccctgggggtggctggggagagggaatgcatttcccttgccacaggtggtctgcttctgctggcctgagctccaagtggagcagcccgggccagccttggtgcatgaagaggcaccaggcacaccgccttgaggtgggcagtgcccatgggggcccgagtggatgggaccgagggtgagtggagcctccttcctcccctctctagtacccccgcctcccacacacttgcacggatcggcctcccttgggagatcagcctccatgggcccctcgtccacccttgctgctttccatttgcctaattaccaagcagaagttgcaatctggtttgctttatttttgtatgtgaaataacccccaaagcccaatctcctcctacgttcaatattggttggggcatccgtcatctccccttaagtgcgccccctccccacccaagtatcataggaaaccggtgaggtctggtgtctctggtttgagacggtaagttgggacccatccctgtctgggtgcccactctgacctttagtttgcccttctgtgaaatgggtgtattgggtagcaagccctcttcagaaagcgctgctggtgtcagagcagctgcccagtaccaggtggggggtcaaggttgctggtactggggcccccagctgcccacaacccctctttgttctcaccctgcaaaggggtcaaggtcaaaatgagcctcatccttcctatgatctgggaagaggtgatgatcaagtccccaacttcagtgtgaggtggacagagttggggggatggcccctttttgaagaggtgaaaatggttttggagaagcgcagctgcttcactgggggaatgcggcagggactggggcccaggatgctttggcctatggggaaaagccctttaaaaggcagggcccaggccctggagccagcacaagactggcctcgagcccctgagccaggaggtcctggaggagagccaggccggtgggcccgcccaaggctggagggtcagccccaacagggagctgggttggccagggggctggactgctaccagcctctctggcctatggggacccaagaggacacatcccccttttgcccactcttctgtgtcattttgttgttttggtttgtggtggtttttcttttttcttttgtttttcttttttctttctttctttttttttttttttttttttttttttgcacttcgcccacacaggacagtggagccccacctggtcagttccacttccgggctcccatgcacttgcccaaggcggcctctttgggacggggatggtttgaggaaacacttttaaagaaaaaaggaagacattgaaaggttttagtttcttccctatctgcatgtcctctcatatagaaagcccagaattaggggctagaactccaggagagggtctccccgactcatctcttgctgacggtcaccaggatgcagaaatagggagatggttagtgggggccaaagatgccccctcccaggccttcgtggttccctcctccgccccctgcaatctttggaggagtcagtgcctcactccagcagtgagtgcctactgtatgcaggtagtcagccaggcaaagagagactaacggtctcatgggggaaccctcttgcgggaggccgggtagctggagcgaagcgttccggctgcccttgctgctgggtggagtggagagggagacttctttttgttggttttaatttaaaaacacaaaggcctaaagaaatacgtatcttataatttttttaatttttgagacgttcatttaatgaattgtgcacgaatgaattctatatatataaaatatacatatatagctctatatttggggaggggcactgtctcttttttctctcatttttaaaatgaagtgttgttgcctttgtatgtggttcaaccatccagctcccagctggctaaactttgcctccagtggtcaaagatgggaaaagagtggggttggcaggagatggaaaacggaggtgccgccccagcatggggggcaggtcccccagtccaccctgcccctccccctgtggagaagacgcttagttgggggtgtgggtttgggctccattctggattcggcggttccgggggaggggtgggtctgtgccgattactctgtcttgtacgtttgttctgctgctcttcaatattgtatcaacgccaggaaaggggggtgaaaagcctcttttaccccccaaataaattgtcacattccgaagctga

SEQ ID NO: 1813 - protein, 412 aa, Homo sapien
MELSAVGERVFAAESIIKRRIRKGRIEYLVKWKGWAIKYSTWEPEENILDSRLIAAFEQKERERELYGPKKRGPKPKTFLLKARAQAEALRISDVHFSVKPSASASSPKLHSSAAVHRLKKDIRRCHRMSRRPLPRPDPQGGSPGLRPPISPFSETVRIINRKVKPREPKRNRIILNLKVIDKGAGGGGAGQGAGALARPKVPSRNRVIGKSKKFSESVLRTQIRHMKFGAFALYKPPPAPLVAPSPGKAEASAPGPGLLLAAPAAPYDARSSGSSGCPSPTPQSSDPDDTPPKLLPETVSPSAPSWREPEVLDLSLPPESAATSKRAPPEVTAAAGPAPPTAPEPAGASSEPEAGDWRPEMSPCSNVVVTDVTSNLLTVTIKEFCNPEDFEKVAAGVAGAAGGGGSIGASK

SEQ ID NO: 1814 - DNA, 2797 bp, Homo sapien
acgcgcgccctgcggagcccgcccaactccggcgagccgggcctgcgcctactcctcctcctcctctcccggcggcggctgcggcggaggcgccgactcggccttgcgcccgccctcaggcccgcgcgggcggcgcagcgaggccccgggcggcgggtggtggctgccaggcggctcggccgcgggcgctgcccggccccggcgagcggagggcggagcgcggcgccggagccgagggcgcgccgcggagggggtgctgggccgcgctgtgcccggccgggcggcggctgcaagaggaggccggaggcgagcgcggggccggcggtgggcgcgcagggcggctcgcagctcgcagccggggccgggccaggcgttcaggcaggtgatcggtgtggcggcggcggcggcggcggccccagactccctccggagttcttcttggggctgatgtccgcaaatatgcagaattaccggccgggtcgctcctgaagccagcgcggggagcgagcgcggcggcggccagcaccgggaacgcaccgaggaagaagcccagcccccgccctccgccccttccgtccccaccccctacccggcggcccaggaggctccccggctgcggcgcgcactccctgtttctcctcctcctggctggcgctgcctgcctctccgcactcactgctcgccgggcgccgtccgccagctccgtgctccccgcgccaccctcctccgggccgcgctccctaagggatggtactgaatttcgccgccacaggagaccggctggagcgcccgccccgcgcctcgcctctcctccgagcagccagcgcctcgggacgcgatgaggaccttggcttgcctgctgctcctcggctgcggatacctcgcccatgttctggccgaggaagccgagatcccccgcgaggtgatcgagaggctggcccgcagtcagatccacagcatccgggacctccagcgactcctggagatagactccgtagggagtgaggattctttggacaccagcctgagagctcacggggtccacgccactaagcatgtgcccgagaagcggcccctgcccattcggaggaagagaagcatcgaggaagctgtccccgctgtctgcaagaccaggacggtcatttacgagattcctcggagtcaggtcgaccccacgtccgccaacttcctgatctggcccccgtgcgtggaggtgaaacgctgcaccggctgctgcaacacgagcagtgtcaagtgccagccctcccgcgtccaccaccgcagcgtcaaggtggccaaggtggaatacgtcaggaagaagccaaaattaaaagaagtccaggtgaggttagaggagcatttggagtgcgcctgcgcgaccacaagcctgaatccggattatcgggaagaggacacgggaaggcctagggagtcaggtaaaaaacggaaaagaaaaaggttaaaacccacctaagatgtgaggtgaggatgagccgcagccctttcctgggacatggatgtacatggcgtgttacattcctgaacctactatgtacggtgctttattgccagtgtgcggtctttgttctcctccgtgaaaaactgtgtccgagaacactcgggagaacaaagagacagtgcacatttgtttaatgtgacatcaaagcaagtattgtagcactcggtgaagcagtaagaagcttccttgtcaaaaagagagagagagagagagagagagaaaacaaaaccacaaatgacaaaaacaaaacggactcacaaaaatatctaaactcgatgagatggagggtcgccccgtgggatggaagtgcagaggtctcagcagactggatttctgtccgggtggtcacaggtgcttttttgccgaggatgcagagcctgctttgggaacgactccagaggggtgctggtgggctctgcagggcccgcaggaagcaggaatgtcttggaaaccgccacgcgaactttagaaaccacacctcctcgctgtagtatttaagcccatacagaaaccttcctgagagccttaagtggtttttttttttgtttttgttttgttttttttttttttgttttttttttttttttttttttttacaccataaagtgattattaagcttccttttactctttggctagctttttttttttttttttttttttttttttttaattatctcttggatgacatttacaccgataacacacaggctgctgtaactgtcaggacagtgcgacggtatttttcctagcaagatgcaaactaatgagatgtattaaaataaacatggtatacctacctatgcatcatttcctaaatgtttctggctttgtgtttctcccttaccctgctttatttgttaatttaagccattttgaaagaactatgcgtcaaccaatcgtacgccgtccctgcggcacctgccccagagcccgtttgtggctgagtgacaacttgttccccgcagtgcacacctagaatgctgtgttcccacgcggcacgtgagatgcattgccgcttctgtctgtgttgttggtgtgccctggtgccgtggtggcggtcactccctctgctgccagtgtttggacagaacccaaattctttatttttggtaagatattgtgctttacctgtattaacagaaatgtgtgtgtgtggtttgtttttttgtaaaggtgaagtttgtatgtttacctaatattacctgttttgtatacctgagagcctgctatgttcttcttttgttgatccaaaattaaaaaaaaaataccaccaac

SEQ ID NO: 1815 - protein, 211 aa, Homo sapien [sequence omitted]

SEQ ID NO: 1816 - DNA, 972 bp, Homo sapien
cgctgcttaggctccgcggcctccaagctgtagctatgacggcgcgcgggactccgagccgcttcttggccagcgttctccacaacggactgggtcgctatgtgcagcagctgcagcgtctgagcttcagcgtcagccgcgacggcgcctcgtctcgcggcgccagggagttcgtggagcgggaggtgatcgacttcgcccgacggaatccaggggtcgtaatatatgtaaactcgcgtccgtgctgcgtgcccagagtagtggccgaataccttaacggggctgtgcgcgaggagagcatccactgcaagtcggtcgaggagatctcgacgctggtgcagaagctggccgaccagtcgggcttggacgtgatccgcatccgcaagcccttccacaccgacaaccctagcatccagggccagtggaccccttcaccaacaagccgaccacgttccgcgggctacgcccccgagaggttcaggatcctgccccagcccaggtgcaagcacagtgaagagttgccccaccaactgcagccccaggctttggactgttactccggtaaaggtggttcttcccctttgggattccaagcccaggcaaatggaacccatcaatgggcaagttgacagaggttctgcttgggataatgaagagctgcctgtttctttccagtgcctgcttctgggggcagtgaccttgtgaaccactcatttttatgcaagtggcatccctaaaacctgagatgaggaagacttcaagggttttacagggcccttgttttttaaatccaaattgataataatgatctcaaaacacagtgagaggtctgaaggctggcttctgaagaatccctgatgtcttattggaacaaccactgagctacggagagctctgctgtgatgggctaggcactttatatctgtgtgaatacagatttataaaacaggttaataaacttatccaaggtca

SEQ ID NO: 1817 - protein, 197 aa, Homo sapien
MTARGTPSRFLASVLHNGLGRYVQQLQRLSFSVSRDGASSRGAREFVEREVIDFARRNPGVVIYVNSRPCCVPRVVAEYLNGAVREESIHCKSVEEISTLVQKLADQSGLDVIRIRKPFHTDNPSIQGQWTPSPTSRPRSAGYAPERFRILPQPRCKHSEELPHQLQPQALDCYSGKGGSSPLGFQAQANGTHQWAS

SEQ ID NO: 1818 - DNA, 1818 bp, Homo sapien
acgaggctgagcgggacctgcgagcagcgcgggcggcagcccgggggaagcgtccgggaccatgtctggagaactaccaccaaacattaacatcaaggaacctcgatgggatcaaagcactttcattggacgagccaatcatttcttcactgtaactgaccccaggaacattctgttaaccaacgaacaactcgagagtgcgagaaaaatagtacatgattacaggcaaggaattgttcctcctggtcttacagaaaatgaattgtggagagcaaagtacatctatgattcagcttttcatcctgacactggtgagaagatgattttgataggaagaatgtcagcccaggttcccatgaacatgaccatcacaggttgtatgatgacgttttacaggactacgccggctgtgctgttctggcagtggattaaccagtccttcaatgccgtcgtcaattacaccaacagaagtggagacgcacccctcactgtcaatgagttgggaacagcttacgtttctgcaacaactggtgccgtagcaacagctctaggactcaatgcattgaccaagcatgtctcaccactgataggacgttttgttccctttgctgccgtagctgctgctaattgcattaatattccattaatgaggcaaagggaactcaaagttggcattcccgtcacggatgagaatgggaaccgcttgggggagtcggcgaacgctgcgaaacaagccatcacgcaagttgtcgtgtccaggattctcatggcagcccctggcatggccatccctccattcattatgaacactttggaaaagaaagcctttttgaagaggttcccatggatgagtgcacccattcaagttgggttagttggcttctgtttggtgtttgctacacccctgtgttgtgccctgtttcctcagaaaagttccatgtctgtgacaagcttggaggccgagttgcaagctaagatccaagagagccatcctgaattgcgacgcgtgtacttcaataagggattgtaaagcagggaggaaacctctgcagctcattctgccactgcaaagctggtgtagccatgctggtgagaaaaatcctgttcaacctgggttctcccagttacggaaaccttttaaagatccacattagccttttagaataaagctgctactttaacagagcacctggcgtgggccaagtgcctgatactcccttacactgaatcatgttatgatttatagaaatacctttcctgtagcttttatagtcattgtttttcaaagacgatataccagccctcacccaggttttaaaaaagcactggtaggcatagaataggtgctcagtatatggtcagtaaatgttctattgattatcaatcagtgaaaaaaaaaaaaaaaaaaaaaaaaggagattataaaagggatgatgaacatggagctgcatctttttaaacgttgttttttgatgcttcagactcttaatgcttttatataaagctatcaactgtatgttgatcacagtttataagaaagaacaaatcaagattggcaatccttgccgatcttttagaaataccttttctggagaaaaaaaatccacatgaagtgcaataagcttataaagctaagtagttattaatatttctattaacatgatacaaaggatgatgattgtaagtgtttactgactggcagcttttatttcagtattagcacagcgtcttgccagtgttggaggccatgtattatttcagttcaactggatgaaatgttaaataaactcagaatgaaaaaaaaaaaaaaaaaaaaaa

SEQ ID NO: 1819 - protein, 322 aa, Homo sapien
MSGELPPNINIKEPRWDQSTFIGRANHFFTVTDPRNILLTNEQLESARKIVHDYRQGIVPPGLTENELWRAKYIYDSAFHPDTGEKMILIGRMSAQVPMNMTITGCMMTFYRTTPAVLFWQWINQSFNAVVNYTNRSGDAPLTVNELGTAYVSATTGAVATALGLNALTKHVSPLIGRFVPFAAVAAANCINIPLMRQRELKVGIPVTDENGNRLGESANAAKQAITQVVVSRILMAAPGMAIPPFIMNTLEKKAFLKRFPWMSAPIQVGLVGFCLVFATPLCCALFPQKSSMSVTSLEAELQAKIQESHPELRRVYFNKGL

SEQ ID NO: 1820 - DNA, 337 bp, Homo sapien
cctgtctcaaaaaaaaaaaaaatatcacccttaaatcaacaaaaagacctcatgctcatgcagtggacatttcttggcctgttttcctgtgggttttcttcagcatgatatgaagcaactgttggcatagccagtgggataaataagaaatggaatcatttggctgcctcgtcacttgtgctaatggtcagttgtacacacatgacatgtggaagtgacctgtagcagcggtcactcattttaacaattgaactctgctgggttgggtatttacctttgtctagaaaagaaatatgatatattttctctaaataaatttattttcatcattccaaaa

SEQ ID NO: 1821 - protein, 35 aa, Homo sapien [sequence omitted]

SEQ ID NO: 1822 - DNA, 1869 bp, Homo sapien
gtcacccccagcgggcgcgggccggagcacgggcacccagcatgggggtactgctcacacagaggacgctgctcagtctggtccttgcactcctgtttccaagcatggcgagcatggcggctataggcagctgctcgaaagagtaccgcgtgctccttggccagctccagaagcagacagatctcatgcaggacaccagcagactcctggacccctatatacgtatccaaggcctggatgttcctaaactgagagagcactgcagggagcgccccggggccttccccagtgaggagaccctgagggggctgggcaggcggggcttcctgcagaccctcaatgccacactgggctgcgtcctgcacagactggccgacttagagcagcgcctccccaaggcccaggatttggagaggtctgggctgaacatcgaggacttggagaagctgcagatggcgaggccgaacatcctcgggctcaggaacaacatctactgcatggcccagctgctggacaactcagacacggctgagcccacgaaggctggccggggggcctctcagccgcccacccccacccctgcctcggatgcttttcagcgcaagctggagggctgcaggttcctgcatggctaccatcgcttcatgcactcagtggggcgggtcttcagcaagtggggggagagcccgaaccggagccggagacacagcccccaccaggccctgaggaagggggtgcgcaggaccagaccctccaggaaaggcaagagactcatgaccaggggacagctgccccggtagcctcgagagcaccccttgccggtgaaggatgcggcaggtgctctgtggatgagaggaaccatcgcaggatgacagctcccgggtccccaaacctgttcccctctgctactagccactgagaagtgcactttaagaggtgggagctgggcagacccctctacctcctccaggctgggagacagagtcaggctgttgcgctcccacctcagccccaagttccccaggcccagtggggtggccgggcgggccacgcgggaccgactttccattgattcaggggtctgatgacacaggctgactcatggccgggctgactgcccccctgccttgctccccgaggcctgccggtccttccctctcatgacttgcagggccgttgcccccagacttcctcctttccgtgtttctgaaggggaggtcacagcctgagctggcctcctatgcctcatcatgtcccaaaccagacacctggatgtctgggtgacctcactttaggcagctgtaacagcggcagggtgtcccaggagccctgatccgggggtccagggaatggagctcaggtcccaggccagccccgaagtcgccacgtggcctggggcaggtcactttacctctgtggacctgttttctctttgtgaagctagggagttagaggctgtacaaggcccccactgcctgtcggttgcttggattccctgacgtaaggtggatattaaaaatctgtaaatcaggacaggtggtgcaaatggcgctgggaggtgtacacggaggtctctgtaaaagcagacccacctcccagcgccgggaagcccgtcttgggtcctcgctgctggctgctccccctggtggtggatcctggaattttctcacgcaggagccattgctctcctagagggggtctcagaaactgcgaggccagttccttggagggacatgactaatttatcgatttttatcaatttttatcagttttatatttataagccttatttatgatgtatatttaatgttaatattgtgcaaacttatatttaaaacttgcctggtttctaaaaaaaaaaaaaaaaaa

SEQ ID NO: 1823 - protein, 252 aa, Homo sapien
MGVLLTQRTLLSLVLALLFPSMASMAAIGSCSKEYRVLLGQLQKQTDLMQDTSRLLDPYIRIQGLDVPKLREHCRERPGAFPSEETLRGLGRRGFLQTLNATLGCVLHRLADLEQRLPKAQDLERSGLNIEDLEKLQMARPNILGLRNNIYCMAQLLDNSDTAEPTKAGRGASQPPTPTPASDAFQRKLEGCRFLHGYHRFMHSVGRVFSKWGESPNRSRRHSPHQALRKGVRRTRPSRKGKRLMTRGQLPR

SEQ ID NO: 1824 - DNA, 4112 bp, Homo sapien
cccggcccgccgggaccgcaggtaacgggccgcggggccccgcgggccaggaggggaacggggtcgggcgggcgagcagcgggcaggggagctcagggctcggctccgggctctgccgccggatttgggggccgcgaggaagagctgcgagccgagggcctggggccggcgcactcctcccgccctgtctgcagttggaaaacttttccccaagtttggggcggcggagttccgggggagaaggggccgggggagccgcggagggaggcgccgggcccgcgcgtgtagggcccaggccgaggccgggacgcgggtggggcgcaggcccgggtcagggccgcagccggctgtgcgccgtgcccgcccggggcgctgccccctccctcccctgggagctgcgtggctcccccctcccccccacctgcttcctgcctcagcctcctgccccgatataacgccctccccgcgccgggcccggccttcgcgctctgcccgccacggcagccgctgcctccgctccccgcgcggccgccgcccgggccccgaccgagggttgacagcccccggccagggcggcgccagggcgggcaccgcgctcccctcctccgtatcacttcccccaactggggcaacttctcccgaggcgggaggcgctggttcctcggctccctttctccctacttgggtaaagttctccgccctgaatgacttttcctgaagcggacattttacttaaatcgggtaactgtctccaaaagggtcactgcgcctgaacagttttcttctcggaagccccagcacccagccaggtgccctggggcgtgcaggccgccctggcctcccctccaccggcggccgctcacctcctgctccttctcctggtccgggcgggccggcctgggctcccactccagagggcagctggtccttcgccggtgcccaggccgcagggctgatgcccccgctcagctgagggaaggggaagtggaggggagaagtgccgggctggggccaggcggccagggcgccgcacggctctcacccggccggtgtgtgtccccgcaggagagtgtgctgggcagacgatgctggacacgatggaggcgcccggccactccaggcagctgctgctgcagctcaacaaccagcgcaccaagggcttcttgtgcgacgtgatcatcgtggtgcagaacgccctcttccgcgcgcacaagaacgtgctggcggccagcagcgcctacctcaagtccctggtggtgcatgacaacctgctcaacctggaccatgacatggtgagcccggccgtgttccgcctggtgctggacttcatctacaccggccgcctggctgacggcgcagaggcggctgcggccgcggccgtggccccgggggctgagccgagcctgggcgccgtgctggccgccgccagctacctgcagatccccgacctcgtggcgctgtgcaagaaacgcctcaagcgccacggcaagtactgccacctgcggggcggcggcggcggcggcggcggctacgcgccctatgctatggcgacgagctgggccgggagcgcggctcccccagcgagcgctgcgaagagcgtggtggggacgcggccgtctcgcccggggggcccccgctcggcctggcgccgccgccgcgctaccctggcagcctggacgggcccggcgcgggcggcgacggcgacgactacaagagcagcagcgaggagaccggtagcagcgaggaccccagcaccgcctggcggccacctcgagggctacccatgcccgcacctggcctatggcgagcccgagagcttcggtgacaacctgtacgtgtgcattccgtgcggcaagggcttccccagctctgagcagctgaacgcgcacgtggaggctcacgtggaggaggaggaagcgctgtacggcagggccgaggcggccgaagtggccgctggggccgccggcctagggcccccttttggaggcggcggggacaaggtcgccggggctccgggtggcctgggagagctgctgcggccctaccgctgcggctcgtgcgacaagagctacaaggacccggccacgctgcggcagcacgagaagacgcactggctgacccggccctacccatgcaccatctgcgggaagaagttcacgcagcgtgggaccatgacgcgccacatgcgcagccacctgggcctcaagcccttcgcgtgcgacgcgtgcggcatgcggttcacgcgccagtaccgcctcacccggacgcacatgcgcatccaccctcgcggcgagaagccctacgagtgccaggtgtgcggcggcaagttcgcacagcaacgcaacctcatcagccacatgaagatgcacgccgtggggggcgcggcggcgcggccggggcgctggcgggcttgggggggctccccggcgtccccggccccgacggcaagggcaagctcgacttccccgagggcgtctttgctgtggctcgctcacggccgagcagctgagcctgaagcagcaggacaaggcggccgcgaccgagctgctggcgcagaccacgcacttcctgcacgaccccaaggtggcgctggagagcctctacccgctggccaagttcacggccgagctgggcctcagccccgacaaggcggccgaggtgctgagccagggcgctcacctggcggccgggcccgacggcggaccatcgaccgtttctctcccacctagagcgcccctcgccagcccgctctgtcgctgctgcgcggccctggcccgcaccccagggagcggcgggggcggcgcgcagggcccactgtgcccgggacaaccgcagcgtcgccacagtggcggctccacctctcggcggcctcacctggcctcactgcttcgtgccttagctcgggggtcgggggagaaccccgggacggggtgggatggggtaagggaaatttatatttttgatatcagctttgaccaaaggagaccccaggcccctcccgcctcttcctgtggttcgtcggccccctcccccggctccgcgctgctcttagagggggaggggtgtcactgtcggggcactcctagccctacctccggcccttgcgaccacacccattctcactgtgaatctccccgctgggtcggagcgtcgggcagagttggggagtggggaggggactgagccggccggaggcccccgcacccccgctcccacccaccccgggactgataatgtgaagttcctcattttgcacaagtggcactagcccagggccaacccttccttcctcagtcaccaagggcggggagttctggagtcggaaggcgaagagcctaccaccaggtctcccactcccgcggtgccctcccttcccttccctgcggccccggaccatatttattgcatgcgccccggcggccccccatcccgagcccaggctgggctgggctggaacgcggtctctttagctccctcctcttcgtttgtatatttcctaccttgtacacagctcttccagagccgcttccattttctatactcgaaccaaacagcaataaagcagtaaccaaggaccccgaccccgctgctctcttctgcccctgcacaaggacctggatgctgcgcccgctgggtggaggagccagaaagggccaccctcacacaggtgcagaggcttggacctgcctccctccccagtcccagaaacagatcagcaagaggtcaggtatgtttcataactaaaaatttattaaggaaacaaaaccagtgctgcaaacgggacagaaaggagagctgggtctccctcccgaccacccagtcatcggccttccagctggggagagaatcttaaaggagaggccggggaccctgtactccaaagagcccagtcttctgagactctaggggactcctacccccaaactactggccttggctcccctacacggtaccccatcgcttctggcatagtcctgggcctcagggagggcagagctgcgcacccatcctccaggcaggctgtgcagtcaggccatgggctctggggtatcccccactggtcccattaagatttgcccctggctccaccgaaaaccccgtcttcccctaag

SEQ ID NO: 1825 - protein, 547 aa, Homo sapien
MLDTMEAPGHSRQLLLQLNNQRTKGFLCDVIIVVQNALFRAHKNVLAASSAYLKSLVVHDNLLNLDHDMVSPAVFRLVLDFIYTGRLADGAEAAAAAAVAPGAEPSLGAVLAAASYLQIPDLVALCKKRLKRHGKYCHLRGGGGGGGGYAPYAMATSWAGSAAPPASAAKSVVGTRPSRPGGPRSAWRRRRATLAAWTGPARAATATTTRAAARRPVAARTPAPPGGHLEGYPCPHLAYGEPESFGDNLYVCIPCGKGFPSSEQLNAHVEAHVEEEEALYGRAEAAEVAAGAAGLGPPFGGGGDKVAGAPGGLGELLRPYRCGSCDKSYKDPATLRQHEKTHWLTRPYPCTICGKKFTQRGTMTRHMRSHLGLKPFACDACGMRFTRQYRLTRTHMRIHPRGEKPYECQVCGGKFAQQRNLISHMKMHAVGGAAARPGRWRAWGGSPASPAPTARASSTSPRASLLWLAHGRAAEPEAAGQGGRDRAAGADHALPARPQGGAGEPLPAGQVHGRAGPQPRQGGRGAEPGRSPGGRARRRTIDRFSPT

SEQ ID NO: 1826 - DNA, 1152 bp, Homo sapien
tgagcagtgggctgcttaggaagagaaggtcagagttcgcgggggcagaggcattcttgccgctggcccagtcactatgtagtggaggggcagacaccctcccgcaaattctggaaggttcttagtctcgactagggcagtagccccaggactcctagtcgccggcttcaggtcactgccggctgaacggagctgccgtcgccatgtttggctgcttggtggcggggaggctggtgcaaacagctgcacagcaagtggcagaggataaatttgtttttgacttacctgattatgaaagtatcaaccatgttgtggtttttatgctgggaacaatcccatttcctgagggaatgggaggatctgtctacttttcttatcctgattcaaatggaatgccagtatggcaactcctaggatttgtcacgaatgggaagccaagtgccatcttcaaaatttcaggtcttaaatctggagaaggaagccaacatccttttggagccatgaatattgtccgaactccatctgttgctcagattggaatttcagtggaattattagacagtatggctcagcagactcctgtaggtaatgctgctgtatcctcagttgactcattcactcagttcacacaaaagatgttggacaatttctacaattttgcttcatcatttgctgtctctcaggcccagatgacaccaagcccatctgaaatgttcattccggcaaatgtggttctgaaatggtatgaaaactttcaaagacgactagcacagaaccctctcttttggaaaacataatttgaataaaataatttttaatggattctgaaatttgtcatgttttgaagataactgactccatctaaaagtatgaggtcaaaggatcacgaaacctaagtttaaaaactgcttagagactgaagcttaattaaaaatctttattaaaaattaaaaacattgaaaaatgaaaatatgttcatcattaaagacttttttccccttaagcttaaaataccattcaaaggcaagacattttgttttggctatgattcattttttttacttaaaaataaaacctataccaaacagtagtgtgccaagtaaaaaaaaaaaaaaaaaaaaaaaaaaaaaaaaaaaaaaaaaaaaaaaaaaa

SEQ ID NO: 1827 - protein, 197 aa, Homo sapien
MFGCLVAGRLVQTAAQQVAEDKFVFDLPDYESINHVVVFMLGTIPFPEGMGGSVYFSYPDSNGMPVWQLLGFVTNGKPSAIFKISGLKSGEGSQHPFGAMNIVRTPSVAQIGISVELLDSMAQQTPVGNAAVSSVDSFTQFTQKMLDNFYNFASSFAVSQAQMTPSPSEMFIPANVVLKWYENFQRRLAQNPLFWKT

SEQ ID NO: 1828 - DNA, 2457 bp, Homo sapien
cgctgttgcctccgccacctcctccgccgccgcgcgcccctcggagttccgcgccccaccatgcccaacatcgtgctgttcagcggcagctcgcatcaggacctatcccagcgcgtggccgaccgcctgggcctggagctgggcaaggtggtcacgaagaagttcagcaaccaggagaccagcgtggagattggtgaaagcgtgagaggggaagatgtctacatcatccagagcggctgcggggaaattaacgacaacctgatggaactcctcatcatgatcaatgcctgcaagattgcgtcatcatccagagtaactgccgtgatcccgtgtttcccatacgcccgacaagataaaaaggacaagagtcgtgccccaatttctgcaaaacttgtggccaatatgctgtcggtggctggggcggatcacatcatcaccatggacctgcatgcttctcagatacagggattctttgatattcctgtggataatttgtatgcggagcccgcagtcctgcagtggattcgggaaaacattgccgagtggaagaactgtatcattgtttcacctgacgcagggggagccaaaagggttacatcaattgcagacaggttgaatgtggaatttgctttgatccacaaagagaggaagaaggcgaatgaagtggaccggatggtcctggtgggcgacgtgaaggaccgtgtggccatcctcgtggatgacatggctgacacttgcggcaccatctgccatgctgcggacaagctgctgtcagctggagccaccaaagtgtatgctatccttacccatgggatcttctctggaccagctatttccagaataaataatgccgcctttgaggctgttgtcgtcacaaacacaattccgcaagaggacaaaatgaaacactgcaccaagattcaggtcattgacatttccatgatcttggccgaagcaatccgaaggacacacaatggggaatccgtgtcctacctgttcagccatgtcccgctataaatccagaatgggaagtgtccagcaagcctactctgacttctgacttgtttttgttttctggatttttagctgtaggtattcagcaatgataggttaatcactggcaaaagcatcagatctttgtatatgctaagatttattgtttccccttctaaagctcaagatcatttctttccagtttttggggaaatggtggtggttatttggtctttaagtgaactgtcttaaatgagaaacgtttttgtcattttgacttttaacaggtacaggtgatctcttcctttgttctttcagtactttgaggcgacaactttcaagtatataatttcattgtggaagtcatagtttatatatttcgaggttgccaaaggtgacttcacattaaagccttctgtgtaaatatatactgataatgcctatggacatttgggtaaaaccctgtatagaattaattatccttttactttggagtgaaccttggaaaatttataattataataccatggattttgaattttccttttttttttttttttttggataactcagtttcagataaaccatcttggttactgtgcttaatttggaccaaattttatttagcttaatatggacactgacacattttggggggtatacattagacatatcagagcagtgtatttctggatcattttttaaatgacctcttctaaaacataactgtcacttacctgaaatgctgcatcctaaaattccaaaattatattgagcaatcgccaaggcctaaagccaactgacttaaaggtaatcatttcagctaagattaaatttaaagcctaagaatgtatagagctagttttaaaataatgatctcagatttttaaaaaggatataggaacctgcattgtcattctctgaattaagaactgatggtttctatcattatttagccccacctttgtattttaaaatccttcagaatacatttatgaaccaatgcgactggacttagccacacacaatggaaattcagaccttgactatttggtgtttccagttcacaaaggtgatgaagactgtcttgggagcagcttaatcccaaaatttgtacatttcttgctgctcctggcgtggaaacttaagtgagaccaccaaatacattggtcctgtccaattctactgaatgggggtggacctggcatttatctggccaaaaacaggagccagagaaatatgaatataccaaagttgtttgtttagcctccaacttaaattacattagtcaacttatagatactcatatgatcacttttctttttagatactacatcaactagattcaggagtatatcatttgcagtgcttgtattggtttaaaatgtaagattttaagatcctctaacactgtactaaaacatttcaataaaatcattctgactgcgttcaaaaaaaaaaaaa

SEQ ID NO: 1829 - protein, 318 aa, Homo sapien
MPNIVLFSGSSHQDLSQRVADRLGLELGKVVTKKFSNQETSVEIGESVRGEDVYIIQSGCGEINDNLMELLIMINACKIASSSRVTAVIPCFPYARQDKKDKSRAPISAKLVANMLSVAGADHIITMDLHASQIQGFFDIPVDNLYAEPAVLQWIRENIAEWKNCIIVSPDAGGAKRVTSIADRLNVEFALIHKERKKANEVDRMVLVGDVKDRVAILVDDMADTCGTICHAADKLLSAGATKVYAILTHGIFSGPAISRINNAAFEAVVVTNTIPQEDKMKHCTKIQVIDISMILAEAIRRTHNGESVSYLFSHVPL

SEQ ID NO: 1830 - DNA, 2306 bp, Homo sapien
gcgcggcccatggagtcggggctgctgcggccggcgccggtgagcgaggtcatcgtcctgcattacaactacaccggcaagctccgcggtgcgcgctaccagccgggtgccggcctgcgcgccgacgccgtggtgtgcctggcggtgtgcgccttcatcgtgctagagaatctagccgtgttgttggtgctcggacgccacccgcgcttccacgctcccatgttcctgctcctgggcagcctcacgttgtcggatctgctggcaggcgccgcctacgccgccaacatcctactgtcggggccgctcacgctgaaactgtcccccgcgctctggttcgcacgggagggaggcgtcttcgtggcactcactgcgtccgtgctgagcctcctggccatcgcgctggagcgcagcctcaccatggcgcgcagggggcccgcgcccgtctccagtcgggggcgcacgctggcgatggcagccgcggcctggggcgtgtcgctgctcctcgggctcctgccagcgctgggctggaattgcctgggtcgcctggacgcttgctccactgtcttgccgctctacgccaaggcctacgtgctcttctgcgtgctcgccttcgtgggcatcctggccgcgatctgtgcactctacgcgcgcatctactgccaggtacgcgccaacgcgcggcgcctgccggcacggcccgggactgcggggaccacctcgacccgggcgcgtcgcaagccgcgctcgctggccttgctgcgcacgctcagcgtggtgctcctggcctttgtggcatgttggggccccctcttcctgctgctgttgctcgacgtggcgtgcccggcgcgcacctgtcctgtactcctgcaggccgatcccttcctgggactggccatggccaactcacttctgaaccccatcatctacacgctcaccaaccgcgacctgcgccacgcgctcctgcgcctggtctgctgcggacgccactcctgcggcagagacccgagtggctcccagcagtcggcgagcgcggctgaggcttccgggggcctgcgccgctgcctgcccccgggccttgatgggagcttcagcggctcggagcgctcatcgccccagcgcgacgggctggacaccagcggctccacaggcagccccggtgcacccacagccgcccggactctggtatcagaaccggctgcagactgacaccctcggcccacgactgtcttcccaagttttacagacttgttctttttacataaaggaatttgtaggaaatgcagccaaaggtgcagtcggaaaagatgcaggggaaatgtatttatgcagcgacaccccacaatgtgaacaaacagacaaaaaatctgtgccctcgtggaattgacgttctgcttgggaacacagaaaagaactcggtgatgaaataatggagatgattccagtgacaaacgacagagatggtgatggtggtcagggaagacctctctgcagaggtagtgacttgtgatgtgagctgagacctctgtcctgggaagaccaaaagaaaagcatttcaggatgagggaatggcatgcgcaaaggccctgaggctgaaatgtgcccatgtgttctaagaaatgcagcgatgctggtgtgcctggagcagggacggagggggagaatgggaggagacaaggagctgaaggagtagttcccgaaggaccttgtgggtgatatagaggacttcgcttttgctctgagtgaggtgggagccatagaagcttctaagcagaagagggacttgccctaattcaggtgatcacaggtgtcttgtggcctccatgggaggttgaaaaccacagaaggtgaaggggggctgcactgagccacaggaacaatgatggagattccagctaagcccagaccccgtggattctagatagattttagaggcagcagacagaattactgaggaattgagtgtaagagtggaataaagttatcaaggacaatgccaagggtggggcacccccaaatttgactttgggagactcagccaaatcctatctggtaataaaatttcttttttatttttcttttctttctttctttctttctttctttttttttttttgagttgggatcttgtgctctgtcacccaggctggagtgcaatgggcacaattatagctcactgcagcctggaactcctgggatcaagcctggagttcctgcttcagcctccctagtagctgggactacaggcatgcaccaccatgcccagttaataaaatttcttcaaatgcaaaaaaaaaaaaaaaaaaaaa

SEQ ID NO: 1831 - protein, 398 aa, Homo sapien
MESGLLRPAPVSEVIVLHYNYTGKLRGARYQPGAGLRADAVVCLAVCAFIVLENLAVLLVLGRHPRFHAPMFLLLGSLTLSDLLAGAAYAANILLSGPLTLKLSPALWFAREGGVFVALTASVLSLLAIALERSLTMARRGPAPVSSRGRTLAMAAAAWGVSLLLGLLPALGWNCLGRLDACSTVLPLYAKAYVLFCVLAFVGILAAICALYARIYCQVRANARRLPARPGTAGTTSTRARRKPRSLALLRTLSVVLLAFVACWGPLFLLLLLDVACPARTCPVLLQADPFLGLAMANSLLNPIIYTLTNRDLRHALLRLVCCGRHSCGRDPSGSQQSASAAEASGGLRRCLPPGLDGSFSGSERSSPQRDGLDTSGSTGSPGAPTAARTLVSEPAAD

SEQ ID NO: 1832 - DNA, 1390 bp, Homo sapien
aaagtgtagtgaacttggcttctcgcagactcgtagaaagttaaaaaggaagctaccatctaaatggttttattattattccagatattttggtattgttttctgtatcatgatagtctaaaaaactagttttacttttaatattaattggtataataattagttgttttttttccccagtcactgaagatgtgtgcttagttacataaagtacattaatatttgtgtttataaaataatacaatatttatagtataatgtttatatatgtgtttaaattgtgacagcactgcatccacttgaggctcttttttatagctactaggaggtttaggcacttggagttaaattttaaatgaaccacatattttcattttgttaatgtagtttcccattttatgcaaataaaatatttaatgggctctccactcctgtgctcttgtccccttaccgctaccaccctaagagattatcattgttaacatttgaggacatggtgttttgtaacctgttgttttttcttaatatgacaatggcccatattttagcagtaaacaaaaagatacagaagatgaaagcttagccaaacactgtaaatagaaatgggaagctttttcatatcggggaacggtggcttaattgattcttggggaatgggggatcaactaaccataaacaatttcatttaggatttttgcatcatgagggtatttggagagaaatatatcatcctataatgtgcacagtaagtttttcctaatttgttgctttgaggaaagacacaaagcaaactaaacagcctttcatagataaataagtatacagagagtgaaagatatgggtacaagtatatagagacctatcaaaaatacattgcttgtggtattaattctcatgtgtgattttagcatattaaaaggctgttttgtgtttttagaaccataagaataaatggggatgttacctttcagtttgttccaaagattgcatgcatcattaccaaagcttgagtctttttactcccctgtcttgttgagatacctactacttgagcatactctggaatgagaaagtttatcgattaacatgctgcttacgcagataggattagcatttccttaatttagtataccacgtgttgtatcaggcataaaagccagctttttttagtcataccccaatgtttaaaattgttaaatgcagacttcatgttcttttgatcatttaaatcatgacatggatatttttaatttttatattctagtaattatcaattgtcctggtctggctgcttagagtatcagtttgctcaaaattgcttgaatcattaaagcaaatactaattgtgagcattgaccagatcttaagttaaaaaaaaaaaagtcgacgc

SEQ ID NO: 1833 - protein, 39 aa, Homo sapien
KCSELGFSQTRRKLKRKLPSKWFYYYSRYFGIVFCIMIV

SEQ ID NO: 1834 - DNA, 313 bp, Homo sapien
ctagcttgtgaccagcgggatgcattgtaagaaagttgtctgtggttaggagtgcagtctgggtccatggaacaaatttaaactaattggccctcgcaatgatcagtcctaggaccctggccttattattagcatggtgctttaaccaattgtacataataataccactgatagtctactaatgcatttcctagatcccagtttttcttgaatgattaggaatggtggggagaggggaggggagatattctacatgatacttctccaatcttctaaagattataagaaaaaataaaaaattgaagtcacttga

SEQ ID NO: 1835 - DNA, 1798 bp, Homo sapien
gacagtggagggcagtggagaggaccgcgctgtcctgctgtcaccaagagctggagacaccatctcccaccgagagtcatggccccattggccctgcacctcctcgtcctcgtccccatcctcctcagcctggtggcctcccaggactggaaggctgaacgcagccaagaccccttcgagaaatgcatgcaggatcctgactatgagcagctgctcaaggtggtgacctgggggctcaatcggaccctgaagccccagagggtgattgtggttggcgctggtgtggccgggctggtggccgccaaggtgctcagcgatgctggacacaaggtcaccatcctggaggcagataacaggatcgggggccgcatcttcacctaccgggaccagaacacgggctggattggggagctgggagccatgcgcatgcccagctctcacaggatcctccacaagctctgccagggcctggggctcaacctgaccaagttcacccagtacgacaagaacacgtggacggaggtgcacgaagtgaagctgcgcaactatgtggtggagaaggtgcccgagaagctgggctacgccttgcgtccccaggaaaagggccactcgcccgaagacatctaccagatggctctcaaccaggccctcaaagacctcaaggcactgggctgcagaaaggcgatgaagaagtttgaaaggcacacgctcttggaatatcttctcggggaggggaacctgagccggccggccgtgcagcttctgggagacgtgatgtccgaggatggcttcttctatctcagcttcgccgaggccctccgggcccacagctgcctcagcgacagactccagtacagccgcatcgtgggtggctgggacctgctgccgcgcgcgctgctgagctcgctgtccgggcttgtgctgttgaacgcgcccgtggtggcgatgacccagggaccgcacgatgtgcacgtgcagatcgagacctctcccccggcgcggaatctgaaggtgctgaaggccgacgtggtgctgctgacggcgagcggaccggcggtgaagcgcatcaccttctcgccgccgctgccccgccacatgcaggaggcgctgcggaggctgcactacgtgccggccaccaaggtgttcctaagcttccgcaggcccttctggcgcgaggagcacattgaaggcggccactcaaacaccgatcgcccgtcgcgcatgattttctacccgccgccgcgcgagggcgcgctgctgctggcctcgtacacgtggtcggacgcggcggcagcgttcgccggcttgagccgggaagaggcgttgcgcttggcgctcgacgacgtggcggcattgcacgggcctgtcgtgcgccagctctgggacggcaccggcgtcgtcaagcgttgggcggaggaccagcacagccagggtggctttgtggtacagccgccggcgctctggcaaaccgaaaaggatgactggacggtcccttatggccgcatctactttgccggcgagcacaccgcctacccgcacggctgggtggagacggcggtcaagtcggcgctgcgcgccgccatcaagatcaacagccggaaggggcctgcatcggacacggccagccccgaggggcacgcatctgacatggaggggcaggggcatgtgcatggggtggccagcagcccctcgcatgacctggcaaaggaagaaggcagccaccctccagtccaaggccagttatctctccaaaacacgacccacacgaggacctcgcattaaagtattttcggaaaaa

SEQ ID NO: 1836 - protein, 567 aa, Homo sapien
MAPLALHLLVLVPILLSLVASQDWKAERSQDPFEKCMQDPDYEQLLKVVTWGLNRTLKPQRVIVVGAGVAGLVAAKVLSDAGHKVTILEADNRIGGRIFTYRDQNTGWIGELGAMRMPSSHRILHKLCQGLGLNLTKFTQYDKNTWTEVHEVKLRNYVVEKVPEKLGYALRPQEKGHSPEDIYQMALNQALKDLKALGCRKAMKKFERHTLLEYLLGEGNLSRPAVQLLGDVMSEDGFFYLSFAEALRAHSCLSDRLQYSRIVGGWDLLPRALLSSLSGLVLLNAPVVAMTQGPHDVHVQIETSPPARNLKVLKADVVLLTASGPAVKRITFSPPLPRHMQEALRRLHYVPATKVFLSFRRPFWREEHIEGGHSNTDRPSRMIFYPPPREGALLLASYTWSDAAAAFAGLSREEALRLALDDVAALHGPVVRQLWDGTGVVKRWAEDQHSQGGFVVQPPALWQTEKDDWTVPYGRIYFAGEHTAYPHGWVETAVKSALRAAIKINSRKGPASDTASPEGHASDMEGQGHVHGVASSPSHDLAKEEGSHPPVQGQLSLQNTTHTRTSH

SEQ ID NO: 1837 - DNA, 1615 bp, Homo sapien
  Unsure 891: Unknown base
atacacatgcagaagctgtgacacgtgcggaagctgtggtaagtgcatcctccttcagtctcagttctgaaaatagatcatcatggtggcaccaaagagtcacacagatgactgggctcctgggcctttctccagtaagccacagaggagtcagctgcaaatattctcttctgttctacagacctctctcctcttcctgctcatgggcccaactcctgggaaacatctctccgctgcatggcccggaaccccactgtccagcagatagagccaatccagtaccccagagaggatctcagccacctgggactgtggcagctactgtccttctgtgctcccgctttctccagggcttcagggatgatgatgcaggactaagagcctctggaaaggactcagccccaacagtggtgtcagggatcctagggggttccgtgactctccccctaaacatctcagtagacacagagattgagaacgtcatctggattggtcccaaaaatgctcttgctttcgcacgtcccaaagaaaatgtaaccattatggtcaaaagctacctgggccgactagacatcaccaagtggagttactccctgtgcatcagcaatctgactctgaatgatgcaggatcctacaaagcccagataaaccaaaggaattttgaagtcaccactgaggaggaattcaccctgttcgtctatgcaccatttattgaaaagttgtccgtccacgtcatcgagggtgaccaccgcacactcctggagggcagcggcctggagtccatcatcagcaccctggctgagccacgtgtgagcgtgcgggagggctaggccctcgcccccacctgccactggagaccgctccgccatccccacctcaccgccgcgcaanagagctggaagggtcctgccgatgggaccctgccaggcccagtgccactgccccccgagggctgctagacgtggggcgttaggcgtgtcccacccacccgccgcctcccatgggcacgtcgggaacaccggagccgccaacttggagacttcctggtctgtgaagagccgctgacgcccgcaggaaaccggggctgggccttgtgtgccagtcggggttttgtgcttggtcgtttctccgcttggatttgcttatttattgcattgctggtagagactcccaagcctgtccaccctgcaaagactcctcgggcagcatgcgggtcccgcacactgcacccatttcctggatgtcccctgcaggcgcgggaggccatccgggcctgctggctgcggccccctctcagccaggcctggctcagcccactgcgtgggaggtcaccggccactccccgaggagctgggatccccgggatgcaggcccacagtgcggggctgcacccatgatgcggagctggcctccaaccctgcgggccgcgccaggcaccaactcagtgtttgtcagtgtttgtttttccaagaaatggttcaaattgctgctcagatttttaaatttactgtagctgccagtgtacacgtgtggaccccattttatttttacaccaatttggtgaaaatgctgctttcctcagcctccccacaattaaactgcacatggtctctaa

SEQ ID NO: 1838 - protein, 275 aa, Homo sapien [sequence omitted]

SEQ ID NO: 1839 - DNA, 310 bp, Homo sapien
tttttgaaggcttaagcaatcggggacgagctttattgaggcaatcacatccacatttcagttgtttgcaatgattggcaaacggatgagttaaaaaagccttctgcttccacactgttccgtctacattcagaaagcagtaaaaatatattcgtgcaatgaacactttccaccttaagcgtatcatgacagttcacaaatttgccaacagacaatgcaaaacaatatttacaagatagaccctttgtaagttccaaatttagatacttgtggtgtaattctaaaactaacatcgcatgtttttccaggt

SEQ ID NO: 1840 - DNA, 1775 bp, Homo sapien
gagatgaaggtgaagatgctgagccggaatccggacaattatgtccgcgaaaccaagttggacttacagagagttccaagaaactatgatcctgctttacatccttttgaggtcccacgagaatatgtaagagctttaaatgctaccaaactggaacgagtatttgcaaaaccattccttgcttcgctggatggtcaccgtgatggagtcaattgcttggcaaagcatccagagaagctggctactgtcctttctggggcgtgtgatggagaggttagaatttggaatctaactcagcggaattgtatccgtacaatacaagcacatgaaggctttgtacgaggaatatgtactcgcttttgtgggacttcttttttcactgttggtgatgacaaaactgtgaagcagtggaaaatggatgggccaggctatggagacgaggaagagccattacatacaatattaggaaagacagtgtatactgggattgatcatcactggaaagaagctgtttttgccacatgtggacagcaagtagacatttgggatgaacaaagaactaatcctatatgttcaatgacctggggatttgacagtataagtagtgttaaatttaacccaattgagacatttctcttgggaagttgtgcatctgacaggaatatagtactgtacgatatgaggcaagctactcctttgaaaaaggttatcttagatatgagaacaaatacaatctgttggaaccctatggaagctttcatttttacagcagcaaatgaagattataacttatatacttttgatatgcgtgcactggacactcctgtaatggtccatatggatcatgtatctgcagtgcttgatgtggattactctcccactgggaaggagtttgtgtctgctagtttcgataaatctattcgaatctttcctgtagacaaaagtcgaagcagggaggtatatcatacaaagagaatgcaacatgttatctgtgtaaaatggacttctgacagcaagtatattatgtgtggatctgatgaaatgaacattcgcctgtggaaagctaatgcttctgaaaaattgggtgtgcttacatcacgagaaaaagcagccaaggattataaccagaaattgaaggagaaatttcagcattatcctcatataaaacgtatagctcgtcatcgacatctaccaaaatctatctatagccagattcaggaacagcgcatcatgaaagaagctcgtcgacgaaaggaagtgaatcgtattaaacacagcaagcctggatctgtgccacttgtgtcagagaagaagaaacacgtagtggcagttgtaaaataattggtattcctaacaatcctgatgtataattatttgttacttttgatttgagaactctacaaataaaagtgctgggactagattaattgcaaacattttagttatatgtgtagagctttattgttactccttttagctaccctgaaaaatgatccttaaaggtggcctagttggtaagactgttttatccttaatctgcattcttctttcattgtagaatacagtatttgcaactcattttttcttgtttttattacagatatacttactttctctttgatctattattgtagacactatacattcaaattgacatttaagaccaaacatctcttatgttatctttaatattactttgaataatgattgcaatgatgtttcttcctgtgattccacataacatttagaataatgatgtcaattttttacaactg

SEQ ID NO: 1841 - protein, 445 aa, Homo sapien; identical to SEQ ID NO: 1654

SEQ ID NO: 1842 - DNA, 2025 bp, Homo sapien; identical to SEQ ID NO: 1341

SEQ ID NO: 1843 - protein, 223 aa, Homo sapien; identical to SEQ ID NO: 1342

SEQ ID NO: 1844 - DNA, 3828 bp, Homo sapien
  Unsure 3065-3105: Unknown base
gtgaaattgaagtttgtgtatatgaaagttatcttagacatatttttaattctccagtttctgcaaaataattaaaatatacagtaactggtctcctaaatcctgaatttaatgtattaaatacttatgttctttatattggtgcctttttaaaatgcattgagagtgttggttagctgttgcagctgtacaacacttttaatatgcatttttaaaaatcacttaaaattgagtactatataattcatctctgcatttttagtgcaaatctttagagcaatttctaatagagaaattttcagctcagctgttaaaaggaaaaggaaactttgaaactagactttactacctttttagtttcatagtatttctgaatatgattacaagattatgcaggtaaaatatagagtgaaactttacctgtgaattgaattataatttgtgtttttgttttgtttttaaggaagaataagttctgtatcaaacaagaatttattagataattttttggtcaataaaatacagtattcatttggattttcatctccagactagtattgttctagtcttggaatctgtattttctaatctgttagaaaatagagattgaaaattgatggaataatgtgaaaaagcaggtaattaattctccttgaacaaagcaaaactgaacagtcatatcacattgctattctccaaagcataatctcaaatggtttcatatcatggttgtgtattacttgcaatgggtgtgttaggatatgacagctttttaaaaaaatgagctgctggttatacaaagcaaatggcatatgaccaagaagctgtgatatgctagtgtttctttttatcatagtgtattactaggccaaataatgacaccttgaatatttttacatttattgcagaaaccttaaacttggaatttccataaggtttttatgtaatattctatttctagctttttagttttatcttgctgtactgtaagtttgaggatatttttcacctgcactcttaggaataagttcataattctgtttatggggctttcctcccataacactgcatttgtatattttctgtataaaatatgtgttgtgtattaacctttatcccatacagagagtggtacatgaatgactagttttctaagatgtcctttttattgtgaataaaatataaaagttaaaggccctctgctaagtcacataaagtacagcatataagttcatataggtacaaataaatgagtttgcagtggattgggccttcaaattacctcaagtgacagatagtaagaaaagcttcttgagcaggtggaggtcactgaatcccctactatgcacttatcaagattttacttactttaatttactggaaattgattttttaaaaaatgactacactgtaacaagggaagggatctgggtttttttgttgttttattcttgttttttttaagtagttcaaattctgaaactgtgatttaaaaattttttacagtcaagcattctgattttgaacataactcccttccctttctgtgtaacaaaggtctctctgttatctcttaaattttgttacatctccctcagcctctttctttgtccgtctcccttctgtcattgtctatggatgtttacctctctgttctcctaaaagtttgaagattaggtcaactcttatttctagttcattggtaatttaatcctaatttttttttcgtgatttttgttggttgtataatctgctgacgtatttttatactcaagtgtagttttctattaaaaagaaaagtggttggattaaaaatagtaagctatgtaaccctcatgttactttcactttcaaatattgggtacctaaaacattacttcagagattatgtaatcctattatagtatgtttgctttcctttattgttggattttacattctgatttggctttcctccaaaaaatgtatatcatgaaagactagacagttatttgcaagtgtttagaaaggtgttaaaaatgtaaagcaaagagtcttaactttctcctaattgggagaaaaatgctttaacattactataataatattccaggtttggagggggtctccaggccccatatttgctgttaatagttggaccttttagaccatgtgttatttgcaatcccagaatgattgcttctgctattagttaaaaagatactattcttttctttctgtacaagtgcaatactccccttgaagtcttaaaaactatggtgatttttttttcttttctgacctattcttcctttagctaatgacaaaaagaaactcataaaagtcatagtatgttaaaggacacaacaagcaaagagaaaaacactccacaatcaaaagattacagaatgtggaaaccactagtctgatctcatggtatctttatttaagctaaatttccatggaaattagtaatcttttgcttgaaaaatgtgtcctaaagttgaactttttacagattgaatcttcttagaccctcgcccaatgctctaaattaagaacctaatacttaatatttttattttacttctccccttttagaaataaacttttaaataaaagcaaagcacttagctgagttttaaacacttacatatcacctattggagaaatttttttttaaaaatatttggagcagtcctgttttcatacaaatttaagtaagaggtatttttcttatacatatttatatgtagtgtgctaattttctttttttatacctgtgtccctgtagtaaaactgctgtaatataaatacatgttttgttaaaagataacatttctttggcatttcttttaaaggcagttactgcatttctgcatttgtacagtatgtgtcttggccattttagatattctttctttaacaataccaaaggtaattagactattttaaagactaattgcttgacagtttctagggtattttgtgttttagaagcaaaaaaagaaaaaaaaataggtcaaaccagtaaacctcattttttttcaaactaataatttggggaaataaaaactattgtttannnnnnnnnnnnnnnnnnnnnnnnnnnnnnnnnnnnnnnnnaagttaaaattccataccttgtatgtcaggtttgctaagtgtaatgtagttttttttaaggctcaaataccatacctcagaaaatgaggtttactatggaaatactgaaacagtctttgcagctgtgtgacaagtcactctactacatactgatttggagacctccgctaaatagttttatcactgcagactaaaatgtgggacttgtatcttctttgtttttaatgcacacacatacatgttctgtgcatgtatgtggttactgtgtatatgtgtatgagtgttgtatatgcatgtgtgagtgtgtgtctgtatgtgtgtacaactaaagaagctgcagaaactttgtaatactttgtgaaaaggattatattataaaggtttgtactgtctgagtgcacagctactggaataaatttagggaatctcaggaacaagcatataatttgtccaagatttatttcttctcagaagtgtaagtgcagtttttaattctgtatattatttaatattttaccaataaaataaacttctgacatacagaagtcctaggtctttactcttaagtttgaccttctacagagtcctagagcatggagacaatgcagccagttctttgtttatactaacaaggtttggtccagttcctaataaattcttaatttgtatctgagatgtcagcttggcctttactgtctatatttgtatgaacattttgatcac

SEQ ID NO: 1845 - protein, 24 aa, Homo sapien
VKLKFVYMKVILDIFLILQFLQNN

SEQ ID NO: 1846 - DNA, 1329 bp, Homo sapien
gagctataagacaacaggactgaacagggagccaactgtttctttgaacagtaaatcaggaacaccaatggaccaaaatgaacacagtcactggggaccacatgcaaagggccaatgtgccagcagatctgagctgagaatcatcctggtgggcaaaacaggaactggcaaaagtgctgcagggaacagcatcctcaggaagcaagcatttgaatcgaagctgggttcccagaccttgactaagacttgcagcaaaagtcagggaagctggggaaatagagagattgtcattattgacacaccagatatgttttcttggaaggaccactgtgaagctctgtacaaagaggtgcagaggtgctacttgctctctgcaccaggaccccatgtgctgctcctggtgactcagctgggccgctatacctcacaggaccagcaggctgcacagagggtgaaggagatctttggagaggatgccatgggacacacaattgtcctctttacccacaaggaagacctcaatggtggctccctgatggattacatgcacgactcagataacaaagccctaagcaagctggtggcagcatgtggtgggcgaatctgtgcctttaataaccgtgctgaagggagcaatcaggatgaccaagtgaaggaactaatggactgtattgaggatctgttgatggagaaaaatggtgatcactataccaatgggttgtacagcctaatacagaggtctaaatgtggacctgtgggatcagatgaaagagtaaaggaattcaaacagagccttataaagtacatggaaactcaaagaagttacacagccttggctgaagcaaactgcctaaaaggagccttaatcaaaacacaactgtgtgttttattttgtattcagttgtttctcagattgataattctgtggctttgcatactgcacagcatgtgcaatttgttttgttgcttactctttagtatgtgcaatttattctgcagtttgctgtttattatacccaaaaagttaatgatatttttgagaacagttattagactagaacgcaagactcctaggttatagttacagatcccagttattatttactcactatcatttagtgggtgaatcacagtaatttccctgtaaaatgtggtacctgaagtcatatttgagattctatgaaatgtttaaatcttaacatcactccaattattaatgaaccaaatcatacgataagttactgtttgcattgaaatataatatcaaagccttttgaaatctgtaaacataaaattcctctcattttcaaataaaaaaaaaaaaaaaaa

SEQ ID NO: 1847 - protein, 359 aa, Homo sapien
SYKTTGLNREPTVSLNSKSGTPMDQNEHSHWGPHAKGQCASRSELRIILVGKTGTGKSAAGNSILRKQAFESKLGSQTLTKTCSKSQGSWGNREIVIIDTPDMFSWKDHCEALYKEVQRCYLLSAPGPHVLLLVTQLGRYTSQDQQAAQRVKEIFGEDAMGHTIVLFTHKEDLNGGSLMDYMHDSDNKALSKLVAACGGRICAFNNRAEGSNQDDQVKELMDCIEDLLMEKNGDHYTNGLYSLIQRSKCGPVGSDERVKEFKQSLIKYMETQRSYTALAEANCLKGALIKTQLCVLFCIQLFLRLIILWLCILHSMCNLFCCLLFSMCNLFCSLLFIIPKKLMIFLRTVIRLERKTPRL

SEQ ID NO: 1848 - DNA, 4243 bp, Homo sapien
cccaatgttttcacttaataactatgacaaccttaaagaatgtcacttaagttagaaaataagcaggctaagaagtgattctaattaggacccccactcagtttgctagtcatgcctgcctgacagaacataagcttttgtaaagtatttagactgataacacatgcagtatgaaaacattatagactgcagttagaagactaattttttaaaagcactcaaaacatagaactaagatttagaatatatgtccatttataatgaaataatttatgttcataatgtgaacatgtaagataagtaaataaagcattacttgttttataatatcaggaagagagaaggaaacattagtttataacaatgtgctatttaatatctgtattttgaacatttaaaatactctgatggtaaggttgccaaagtaattttgaattcataaaaattgtttataccacaataatgtgggatatgtttacaggctcttttattttgtggtagttactttatagttcagatgaatttgcatttcagtcacttatagtaaataaagtatattaaatatttgttggaataaaaatctcaatgtaataggacatagataaattatgcaacagcctgctttgatgaaagctggtgcattatgtgagctgccacagttaatactttgtattaacattgcttacttcccccatttgcttcacctatctgactacaattgctggaatcattctttttgtggtgcttcctccaagtgaaataactatgttattaaaacctactggattaattttatcaaatatcagacttactgatctcttggcagagatttattggtgtctcagtgtgatcacaatacaagttgtagcaaccattttataaaactcttagagaattatgtagataaaatggaaattacataatcctaaaacatttttgagggctaattgataataatttcagcaattttattaagaacccagtaaattaatccctaatttgtacgttttttgttcaacttaccgtgtctgcaaccattatatagacttcattgatactcagcaattactacagtgtgtcttacaatgttataaaaaacaaacagcaatctctgtttctgccagaagttagatatttttttatagtcctgatgaatttgttgtgagtagacaccacatagttatttctgtttgcatataaatttgctgctatttatttgtatgtttttctactgtagtatgctattgatttctgaagttataatcataatttttattttagtaatccaagctaaatgggcaaccagaagtaatatctgctagggtgcaatccatcagcattggttcagtgcatatacataagtaaaccagtttaaaaaaattttactaagcaaaaggtagtagcaatattgctagttaaagattaccattttaggggaaagttcaaaggtttaacttcctgaaaccttttaaacttttcagtgcaagaatgaaaatgtttgaaagccttgttaagctcataaaagtttcatttaaacactgtagagtttcctacctttgttgtgtaaaggatatagaaaatatttttctatggacagaaggttgaaactgttaacttctttaatttcattgtttaaaggagataaaatgttatttgtgtgtctttcatgctgtaaagaaaatgaatgtatctttcaaatgtcattagaattatggcttgattctaaggatactctatttgttttaaagtctacacgggattgaaaagaaagggaagagtattacacttcattgtacaaaatgtaattttagaagaaaaactaattttcattataaacaagagcaatcattgaagcattttcagatataatgtacattctttttcattttgctttgcctctagaatagaaacttttcagaaaatttgcacatactgtttgtaagtataaaataattgaattctagacttttggagtgtggaagggtgtttgtgtgtgaaggtaataaatgtgttgctgcatgtgtttaccatagagaacgttgccaggctttgtcaaatgaggacattgttgtgagggtgtgacttttgtgaagccagaaaactgtgcctaagattcattacagtgagtatgtgcagaggcccctgacccagtaaatgctttttgcctttttattcccaatgtcttggacagttgagacaacttggcccaactctgaattgtagcagtgatgtcttatatgcttacgagtttatattaattcagctgaacaagaactacatcttaaaccacctttgtaggtatgattaatacgtgcaacagctgctttaaaaggtggtatttattattcatcactcatgaaacttgactcagtgaggacttcattatttttatttctctttccacgtctccaactttttaaaaatcactaatttaactctttgttaagtactcaagtacaaagtgatctcttctttcatgaactttgctataactgttgaaaggattggtgtcaggctctctcaaccctgggagtttccaaaatttagcaaatattacttgtgataagcttaaatgccacatcgctaagtacaattattaccaggaatccgtcaagggggagatagccccgctcacacccttagacccaaacaggtgctggttcatgctttctccacaaattggcagttgggtacttccccactgtcatcacagttgagctcattttaacatatattcaaagaagctttttagtttctactcctgaattgtagtgttcaagttatttgccttcctgggtaagaaaattttaacccaagtctgggattctctggcacctgtcttttcccatctttcaatgagttggcaagattaggtcaaatttcaatgctaaatttgattttttgaattttaaatagttgcactttatttcatgctgaccaccaacttaatttatacattttaaaataaaattatcctagaagtgttgtaaacgtgggaaaattttaattagtgttggaggtcattagattggacccaggtttaaatataatgatctcttcacagcttatttgatgtttaagagcaacttgtgtgatcttagctttgcaggttttctgtaatttatgtagcacaataaaggataaccagttgactgtgttactggactctgagttctcacagctagtttcatctaagcttggtttattatcatttctgctttggatttttttgtgcatcacatgaatacttagaaatccatttgttttcagtgtagtacctagggtgaagtagatgctgcacaagtaagtttaagggaataaaagtcccgacactttatatacatgttgaggggcacgatttaagagactgaaacagtttacattaaactgtttttattttctgccagtagactctatctgcttaaaaaaataaaaattgttcaacccagtgttctccagcatcaggacattacagttgtaatctatgttgtaatcttttcaaataagaaaagctactccttattctctacagtgtaggcttaattttagaaccgataatttactatatctgcattattgatatttttaagtagtagttttaaaaataattatttctatgtggagggtgttttaatttgggattttttttttcttgtaacaggtgctatttgtaaatatgaaggggaaaagtcacttagttaaaagtctagcttatgtcataattaagatacaattattcatttcatgtttgattctattaaactagtggcaaaacagaattggtcccttagttttttagattacctttccccctatatcacaaaaatatctctttccatatgatctcataattgaggcaaagaagctaagggtttatttaaaatgtgtataagcttgaatttggtcaacactgcataatttgaaatcactctgcatttgtcactgcagcttactgtatgcttgaaaggccttgtgtgtttgtcttaattttagtgaaaaaattagaatttctgccattcatgtacaaaaaaattacaactacagcaaacaagataaaaatgctggtttgcattaatactgttttagtcttaagagcaatttatattatgtgaaatgctgttacacatattttgttggccatatttcattttgagaaacagttgttcaggtacaaacatgaaaaacaactctagctatgactcttaatgttcaattgcaaaataaagatgtgctttagtaatct

SEQ ID NO: 1849 - protein, 12 aa, Homo sapien
MFNCKIKMCFSN

SEQ ID NO: 1850 - DNA, 1450 bp, Rattus norvegicus
ggcacgaggggcaagcggaacgcggcagcggggctgggcctgtgcggcggccgccggagcgctttggaaggcgcacggggcgaagatggcggcggagcgacaggaggcgctgagggagttcgtggcggtgacgggcgccgaggaggaccgggcccgcttctttctcgagtcggccggctgggacttgcagatcgcgctagcgagcttttatgaggacggaggggatgaagacattgtgaccatttcgcaggcaacccccagttcagtgtccagaggcacagcccccagtgataatagagtgacatccttcagagacctcattcatgaccaagatgaagatgaggaggaagaggaaggccagaggttttatgctgggggctcagagagaagtggacagcagattgttggccctcccaggaagaaaagtcccaacgagctggtggatgatctctttaaaggtgccaaagagcatggagctgtagctgtggagcgagtgaccaagagccctggagagaccagtaaaccgagaccatttgcaggaggtggctaccgccttggggcagcaccagaggaagagtctgcctatgtggcaggagaaaagaggcagcattccagccaagatgttcatgtagtattgaaactctggaagagtggattcagcctggataatggagaactcagaagctaccaagacccatccaatgcccagtttctggagtctatccgcagaggggaggtgccagcagagcttcggaggctagctcacggtggacaggtgaacttggatatggaggaccatcgggacgaggactttgtgaagcccaaaggagccttcaaagccttcactggcgagggtcagaaactgggcagcactgccccccaggtgttgagtaccagctctccagcccaacaggcagaaaatgaagccaaagccagctcttccatcttaatcgacgaatcagagcctaccacaaacatccaaattcggcttgcagacggcgggaggctggtgcagaaatttaaccacagccacaggatcagcgacatccgactcttcatcgtggatgcccggccagccatggctgccaccagctttatcctcatgactactttcccgaacaaagagctggctgatgagagccagaccctgaaggaagccaacctgctcaatgctgtcatcgtgcagcggttaacataaccgcccagccagctgcctggcctccctcctgtgtttcccatggccagtggccatgccccatggggatcgcccctcctgcccccttgtgcacacccagcagtccagtgcaacgtctcctccatagctctgggttcttagatcttggttggacgtttgttttctccttagttgcatttcctgggtttttgtgatgatcaatggactttaatgaaaaaaaaaaataaaaacaaccaaaaaaaaaaaaaaaaaaaa

SEQ ID NO: 1851 - protein, 370 aa, Rattus norvegicus
MAEERQDALREFVAVTGAEEDRARFFLESAGWDLQIALASFYEDGGDEDIVTISQATPSSVSRGTAPSDNRVTSFRDLIHDQDEEEEEEEGQRFYAGGSERSGQQIVGPPRKKSPNELVDDLFKGAKEHGAVAVERVTKSPGETSKPRPFAGGGYRLGAAPEEESAYVAGERRRHSGQDVHVVLKLWKTGFSLDNGDLRSYQDPSNAQFLESIRRGEVPAELRRLAHGGQVNLDMEDHRDEDFVKPKGAFKAFTGEGQKLGSTAPQVLNTSSPAQQAENEAKASSSILINEAEPTTNIQIRLADGGRLVQKFNHSHRISDIRLFIVDARPAMAATSFVLMTTFPNKELADENQTLKEANLLNAVIVQRLT

SEQ ID NO: 1852 - DNA, 1861 bp, Homo sapien
ggcacgagggctgggcgacggcgccgccatgtacctgggcgaggtgtgcacggcgaacggcgagcgctgggagctgcagctcaagggcgccgggcccacgcccttctccagacaggccgacggtcgcaaggtcctacggtcaagcatccgggagtttctatgcagcgaagccatgttccacctgggagtccccaccacacgggccggcgcctgcgtcacgtccgagtccacggtggtgcgcgacgtgttctatgatggtaatcccaaatatgaacaatgcacggttgtgttgcgtgtagcttccactttcataaggtttggatcctttgagatttttaagtctgcagatgagcacacagggcgtgcaggccccagcgtggggaggaacgacattcgagtgcagctgctcgactatgtcatcagctccttttaccccgagatccaggctgctcatgccagcgacagcgtgcagagaaatgctgccttcttccgggaggtgacgcggcgcacggcgcggatggtggccgagtggcagtgtgtgggcttctgccacggcgtgctcaacaccgacaacatgagcatcctggggctcaccatcgactacgggccctttggcttcctggacaggtacgaccccgaccacgtgtgcaatgcctccgacaacaccggccgctacgcgtacagcaagcagcccgaggtgtgcaggtggaacctgcggaagctggccgaggccctgcagccggaactgcccctggagctgggggaggccatcctggccgaggagtttgacgccgagttccaaaggcactacctgcagaagatgcgcaggaagctgggcctcgtgcaggtggagctggaggaagacggggcgctggtgtccaagctcctggagaccatgcatctgaccggtgccgacttcacaaacaccttctacttgctgagctccttcccagtggagctagagtcgccaggcctggcggaattcctggccaggctgatggagcagtgtgcctccctggaggagctgaggctggccttccggccccagatggatccccggcagctatccatgatgctgatgctggcgcagtcaaacccgcagctgttcgcgcttatgggcacccgggcaggcatcgccagggagctggagcgtgtggagcagcagtctcggctggagcagctgagtgcggcagagctgcagagcaggaaccagggccactgggctgactggctacaggcgtacagagcccggctggacaaggacctggaaggcgctggggacgctgccgcctggcaggctgagcacgtgcgcgtgatgcacgccaacaacccgaagtacgtgctgaggaactacatcgcgcagaatgccatcgaggctgccgagcgcggggacttctcagaggtgcggcgggtgctgaaactactggagaccccttaccactgcgaggcgggggccgccacagacgccgaggccacggaagccgacggggcggacggcaggcagcgctcctacagcagtaagcccccgctctgggcagcagaactgtgcgtgacatgatcttcgtaacggcctcggcacgctccacacccctggagtctcccgaggcccccatgtgctgctgagtggccaagatgatgccaggctgccctatacactgggggattctgccctggcccatgcacacccgtctttccatgatggcagagacatccagtcaggacctgacccgtctctgtctgaggccggctcagcagtgcagcctggtccctgggggctggacccaggctcctaaataaaccagcaactccctcgaaaaaaaaaaaaaaaaaaaaaaaaaaaaaaaaaaaaaaaaaaaaaaaa

SEQ ID NO: 1853 - DNA, 4538 bp, Homo sapien
tcgtgtttcggtgagtgtggcggagatggagagccgggatcccgcccagccgatgtcgcctggagaagcgacgcagagtggcgcccggcctgccgaccgctatggcctattgaagcacagtcgcgagttcttggacttcttctgggacattgcgaagcctgagcaggagacgcgacttgcggccacggagaagctgctggagtatctgcgtggcaggccgaaggggtccgagatgaaatatgccctgaagcgtctaatcacgggactcggggtcgggcgagaaacagcccggccctgctacagtttggccctggcacagctgttacagtcttttgaagacctccccttgtgcagcatcctgcagcagatacaagaaaaatatgacctgcatcaggtgaagaaggcaatgctgagacctgctctctttgcaaacctgtttggagtgctcgccctctttcagtcaggtcggctggtgaaggaccaggaggcactgatgaagtcggtgaagctgctgcaggccctggcccagtaccaaaaccacttgcaggagcagccccggaaggccctggtggacatcctctccgaggtctcgaaggccacattgcaggagatcctgccggaggtcctcaaagccgacttgaatataatactcagctcccctgaacagctagagctcttcctcctggcccagcagaaggtgccctccaagctcaagaagctggtgggatccgtgaacctattctcagatgagaatgtccccaggctggtgaatgtgctgaagatggccgcctcctctgtgaagaaggaccgcaagctgcccgccattgctctggacctgctccgcctggcgctcaaggaagacaagttcccacggttctggaaggaggtggtggaacaagggctgctgaagatgcagttctggccagccagctacctgtgtttccacctgctgggcgcggccctgcccctgctgaccaaggagcagctgcacctggtgatgcagggagacgtgatccgccattacggggagcacgtgtgcactgctaagctcccaaagcagttcaagtttgccccagagatggacgattacgtgggcaccttcctagaggggtgccaggatgaccctgagcggcagctggccgtgctagtggccttctcatctgtcaccaaccaaggcctccctgtcacgcctactttctggcgggtcgtgcggttcctgagccctccggccctgcagggctatgtggcctggctgcgggccatgtttctccagccagacctggactccttggttgacttcagcaccaacaaccagaagaaagcccaggattcatcgctccacatgcctgagcgagctgtgttccggctgaggaaatggatcatctttcgattggtgagcattgtggacagcctgcacctggagatggaggaggccttgactgagcaggtggccaggttttgtttgttccactcgttctttgtcacaaagaagcccacatcccagatccctgagacaaagcacccgttctccttccctttggaaaaccaggcccgagaggctgtcagcagtgccttcttcagtctgttgcagaccctcagcacgcagttcaagcaggcaccgggccagacccagggtgggcagccctggacctaccacctggtgcaattcgcagacctcctgttgaatcacagccacaacgtgaccaccgtgacacccttcactgcgcagcagcaccaggcctgggaccggatgctgcagactctgaaggagctggaggcccactccgcagaggccagggctgctgccttccagcaccttctgctcttcgtgggcatccacctcctcaagtcccctgcagagagctgtgacctgctgggtgacatccagacctgcatcaggaaaagtctgggagagaagccccgccggagccgcaccaagaccatcgacccccaggaacccccgtgggtagaggtgctggtggagatcttgctggccctgttggcccagcccagccacctcatgcgccaggtggcccggagcgtgtttggccacatctgctcccacctgaccccgcgtgccctgcagctaattctggatgtgctgaaccccgagaccagtgaggatgagaatgaccgtgtggtggtgacggacgattctgatgagcggcggctgaagggtgcagaggacaagagcgaggaaggtgaggacaacagaagctcagagagtgaagaggagagcgagggggaggagagcgaggaggaggagcgcgacggggacgtggatcagggcttccgggaacagctgatgaccgtgctgcaggctgggaaggcgctgggtggagaggacagtgagaacgaggaggagctgggggatgaggccatgatggccctggaccagagcctcgccagcctctttgccgagcagaagctgcgtatccaggcccggcgagacgagaagaacaagctgcagaaggagaaggctctgcggcgcgacttccagatccgggtgctggacctggtggaggtgctagtgaccaagcagcccgagaatgccctggtcctggagctgctggagccgctgctgagcatcatccggcgcagcctgcgcagcagcagctccaaacaggagcaggaccttctgcacaagacggcgcgcatcttcacgcatcacctgtgccgtgcccggcgctactgccacgacttgggtgagcgcgcaggggccctgcacgcccaggtggagcggttggtgcagcaggctggccgccagcccgactcccccaccgccctctaccacttcaacgcctctctctacctgctccgggtcttgaagggcaacactgctgagggctgcgtgcatgagacacaggagaagcagaaagctggcactgaccccagccacatgcccacgggcccgcaggctgccagctgcttggacttgaacctggtgacccgggtgtactcgacagcactgagctccttcctgaccaagcgcaacagccccctcacagttcccatgttcctcagcctcttctcccggcacccggtgctctgtcagagcctgctccccatcctggtccagcatatcacgggcccggtgcggccccgtcatcaggcctgcctgctgctccagaagaccctgtccatgcgggaggtgaggtcgtgctttgaggaccccgagtggaagcagctgatgggccaggtcctagcaaaggtcaccgagaacttgcgcgtgctgggggaggcgcagaccaaggcgcagcatcagcaggcactgtcctccctggagctgctcaacgttctcttcaggacctgcaaacatgagaagctgaccttggacctgacggtgctcctgggtgtgctgcaggggcaacagcagagcctacagcagggggcacactccaccggctccagccgcctgcacgacctctactggcaggccatgaaaaccctgggagtccagcgccccaagttggagaagaaggatgccaaggagatccccagtgccacccagagccccatcagtaagaagcggaagaaaaagggattcttgccagagacgaagaagcgcaagaaacgcaagtcagaggatggcacgccagcggaggatggcacacctgcagccaccggcgggagccagccccccagcatgggcaggaagaagaggaacaggacaaaggctaaggtcccagcccaggcaaacgggacgccaaccaccaagagtccagcccctggcgcccccacccggagccccagcacccctgccaaatccccaaaactgcagaagaaaaaccagaagccgtcccaggtgaatggagctcccgggtcccccacggaacctgcaggccaaaagcagcatcagaaggctcttcccaaaaagggggtcttgggcaaatcaccactgtccgcgctggcacggaaaaaggcaaggctgtctttggtcatcaggagtcccagcctgcttcagagtggggccaagaagaaagcacaggtgaggaaggcagggaagccctgagcacaggtacgggcccccctcagcccctgcctccatctgcctgagacgcctatttttttttttttaaaaccatgattttaatacgcaagctgtttctaaggcgctgccactggggagggtggctgttgccgcctgcccgggcatcctgctctggcaagcacagcctgagccattcctgcgggggtcccagggtgcagagacctccccacccccagttctgggctgggatcctggctccagggccatgtccagggctctggtgtttgcctgggttggtgcatgttgatgtgctggctgcaggcaggtgtgaccatctctcgtgcctgccacctctttgcccccaggcttttttgctgtgagggagccaccagggggtgatttaaataggtttatttcttcatttacaagaggaatatatttggcttctctcttaagactctgagattcacaatcagcagctctaaaaaataaaggagcagtttggcttccggaaggaagaggaggctaaaaaaaaaaaaaaaaaaaa

SEQ ID NO: 1854 - protein, 1328 aa, Homo sapien
MESRDPAQPMSPGEATQSGARPADRYGLLKHSREFLDFFWDIAKPEQETRLAATEKLLEYLRGRPKGSEMKYALKRLITGLGVGRETARPCYSLALAQLLQSFEDLPLCSILQQIQEKYDLHQVKKAMLRPALFANLFGVLALFQSGRLVKDQEALMKSVKLLQALAQYQNHLQEQPRKALVDILSEVSKATLQEILPEVLKADLNIILSSPEQLELFLLAQQKVPSKLKKLVGSVNLFSDENVPRLVNVLKMAASSVKKDRKLPAIALDLLRLALKEDKFPRFWKEVVEQGLLKMQFWPASYLCFHLLGAALPLLTKEQLHLVMQGDVIRHYGEHVCTAKLPKQFKFAPEMDDYVGTFLEGCQDDPERQLAVLVAFSSVTNQGLPVTPTFWRVVRFLSPPALQGYVAWLRAMFLQPDLDSLVDFSTNNQKKAQDSSLHMPERAVFRLRKWIIFRLVSIVDSLHLEMEEALTEQVARFCLFHSFFVTKKPTSQIPETKHPFSFPLENQAREAVSSAFFSLLQTLSTQFKQAPGQTQGGQPWTYHLVQFADLLLNHSHNVTTVTPFTAQQHQAWDRMLQTLKELEAHSAEARAAAFQHLLLFVGIHLLKSPAESCDLLGDIQTCIRKSLGEKPRRSRTKTIDPQEPPWVEVLVEILLALLAQPSHLMRQVARSVFGHICSHLTPRALQLILDVLNPETSEDENDRVVVTDDSDERRLKGAEDKSEEGEDNRSSESEEESEGEESEEEERDGDVDQGFREQLMTVLQAGKALGGEDSENEEELGDEAMMALDQSLASLFAEQKLRIQARRDEKNKLQKEKALRRDFQIRVLDLVEVLVTKQPENALVLELLEPLLSIIRRSLRSSSSKQEQDLLHKTARIFTHHLCRARRYCHDLGERAGALHAQVERLVQQAGRQPDSPTALYHFNASLYLLRVLKGNTAEGCVHETQEKQKAGTDPSHMPTGPQAASCLDLNLVTRVYSTALSSFLTKRNSPLTVPMFLSLFSRHPVLCQSLLPILVQHITGPVRPRHQACLLLQKTLSMREVRSCFEDPEWKQLMGQVLAKVTENLRVLGEAQTKAQHQQALSSLELLNVLFRTCKHEKLTLDLTVLLGVLQGQQQSLQQGAHSTGSSRLHDLYWQAMKTLGVQRPKLEKKDAKEIPSATQSPISKKRKKKGFLPETKKRKKRKSEDGTPAEDGTPAATGGSQPPSMGRKKRNRTKAKVPAQANGTPTTKSPAPGAPTRSPSTPAKSPKLQKKNQKPSQVNGAPGSPTEPAGQKQHQKALPKKGVLGKSPLSALARKKARLSLVIRSPSLLQSGAKKKAQVRKAGKP

SEQ ID NO: 1855 - DNA, 2742 bp, Homo sapien
aggttactatagtgtctgctcctacccctgggacaagatcccctaatgagctggcaggtgggcgtggggggcacaggtacagcttggcttctcagctttgctcccctatcctctgctttgccatgaatctctcatccagccccgcagggatctgcctggccagcagtgagcctgagcccctttcatcctgggacctgccgaccacggctcacatcctcctgggtgaagaatgtcaccttgcttcctatctgcctctttcgtggttggctggggagggggaccggggggtggggtgaggttaacctcattgttgtcttatatggtcatttaaatctcccagggcttcctccaagggccaaaaataatccggagacacagcagctgtgtccagcacacagaggacccggccatctgctttggttcagagccctgtgtctgtcagtcagtctctccctggctctccctccatcctcattcctgcctgaagccatgacccgcttctcctatgcagagtacttttccctctttcactcctgctctgcaccctccaggtccactgcacctcctgagagttcgccggcccgggccccaatgggcttgttccaaggggtcatgcagaaatacagcagcagcttgttcaagacctcccagctggcgcctgcggaccccttgataaaggccatcaaggatggcgatgaagaggccttgaagaccatgatcaaggaagggaagaatctcgcagagcccaacaaggagggctggctgccgctgcacgaggccgcatactatggccaggtgggctgcctgaaagtcctgcagcgagcgtacccagggaccatcgaccagcgcaccctgcaggaggaaacagccgtttacttggcaacgtgcaggggccacctggactgtctcctgtcactgctccaagcaggggcagagccggacatctccaacaaatcccgagagacaccgctctacaaagcctgcgagcgcaagaacgcggaggccgtgaagattctggtgcagcacaacgcagacaccaaccaccgctgcaaccgcggctggaccgctctgcacgagtctgtgtctcgcaatgacctggaggtcatgcagatcctggtgagcggaggagccaaggtggaatccaagaacgcctacggcatcacccccttgttcgtggccgcccagagtggacagttggaggccttgaggttcttagccaagtacggtgctgacatcaacacgcaggccagcgacaacgcgtctgccctctacgaggcctgcaagaatgagcatgaggaggtggtggagtttctgctgtcacagggtgccgacgccaacaagaccaacaaggacggcttgctcccgctgcacatcgcctccaagaagggcaactacaggatcgtgcagatgctgctgccggtgaccagccgcacgcgcatacgccgtagcggcgtcagtccgctgcacctggcggccgagcgcaaccacgacgaggtgctggaggcgctgctgagcgcgcgcttcgacgtgaacacgccgctggcgcccgagcgcgcgcgcctctacgaagaccggcgcagctccgcgctgtacttcgcggtggtcaacaacaacgtgtacgccaccgagctgctgctgcaacacggcgccgaccccaaccgcgacgtcatcagccccttgctcgtggccatccgccacggctgcctgcgcacaatgcagctgctgctggaccacggcgcgaacatcgacgcctatatcgccacgcaccccaccgccttccccgccaccatcatgttcgccatgaagtgcctgtcgctgctcaagttcctcatggacctgggctgcgacggcgagccctgcttctcatgcctctacggcaacggcccgcacccgccggccccgcagccctccagcaggttcaacgacgcgcccgcggccgacaaggagcccagcgtggtgcagttctgtgagttcgtatctgccccagaggtgagccgctgggcggggcccatcatcgatgtcctcctggactacgtgggcaacgtgcagctctgctcgcggctgaaggaacacatcgacagctttgaggactgggccgtcatcaaggagaaggcagaacctccaagacctctggctcacctttgccgactgcgggttcgaaaggccattgggaaataccgtataaaactcctagacaccttgccgctcccaggcaggctgattagatacctgaaatacgagaacacccagtaactggggccacggggagagaggagtagcccctcagactcttcttactaagtctcaggacgtcggtgttcccaactccaaggggacctggtgacagacgaggctgcaggctgcctccctctcagcctggacagctaccaggatctcactgggtctcagggcccagagctttggccagagcagagaacagaatgtgtcaaggagaagaatcatttgtttacaaactgatgagcagatcccagaccttctctaccttcaggaatggcagaaacctctattcctggggccagggcagagcttgaggtgttctggggaaggtggtgctcagagccttccctgtgcccctccacttgttctggaaaactcaccacttgacttcagagctttctctccaaagactaagatgaagacgtggcccaaggtagggggtagggggagcctgggtcttggagggctttgttaagtattaatataataaatgttacacatgtg

SEQ ID NO: 1856 - protein, 587 aa, Homo sapien
MTRFSYAEYFSLFHSCSAPSRSTAPPESSPARAPMGLFQGVMQKYSSSLFKTSQLAPADPLIKAIKDGDEEALKTMIKEGKNLAEPNKEGWLPLHEAAYYGQVGCLKVLQRAYPGTIDQRTLQEETAVYLATCRGHLDCLLSLLQAGAEPDISNKSRETPLYKACERKNAEAVKILVQHNADTNHRCNRGWTALHESVSRNDLEVMQILVSGGAKVESKNAYGITPLFVAAQSGQLEALRFLAKYGADINTQASDNASALYEACKNEHEEVVEFLLSQGADANKTNKDGLLPLHIASKKGNYRIVQMLLPVTSRTRIRRSGVSPLHLAAERNHDEVLEALLSARFDVNTPLAPERARLYEDRRSSALYFAVVNNNVYATELLLQHGADPNRDVISPLLVAIRHGCLRTMQLLLDHGANIDAYIATHPTAFPATIMFAMKCLSLLKFLMDLGCDGEPCFSCLYGNGPHPPAPQPSSRFNDAPAADKEPSVVQFCEFVSAPEVSRWAGPIIDVLLDYVGNVQLCSRLKEHIDSFEDWAVIKEKAEPPRPLAHLCRLRVRKAIGKYRIKLLDTLPLPGRLIRYLKYENTQ

SEQ ID NO: 1857 - DNA, 2272 bp, Homo sapien; identical to SEQ ID NO: 1418

SEQ ID NO: 1858 - protein, 497 aa, Homo sapien; identical to SEQ ID NO: 1419

SEQ ID NO: 1859 - DNA, 492 bp, Homo sapien
atgacagtgaagaccctgcatggcccagccatggtcaagtacttgctgctgtcgatattggggcttgcctttctgagtgaggcggcagctcggaaaatccccaaagtaggacatacttttttccaaaagcctgagagttgcccgcctgtgccaggaggtagtatgaagcttgacattggcatcatcaatgaaaaccagcgcgtttccatgtcacgtaacatcgagagccgctccacctccccctggaattacactgtcacttgggaccccaaccggtacccctcggaagttgtacaggcccagtgtaggaacttgggctgcatcaatgctcaaggaaaggaagacatctccatgaattccgttcccatccagcaagagaccctggtcgtccggaggaagcaccaaggctgctctgtttctttccagttggagaaggtgctggtgactgttggctgcacctgcgtcacccctgtcatccaccatgtgcagtaa

SEQ ID NO: 1860 - protein, 163 aa, Homo sapien
MTVKTLHGPAMVKYLLLSILGLAFLSEAAARKIPKVGHTFFQKPESCPPVPGGSMKLDIGIINENQRVSMSRNIESRSTSPWNYTVTWDPNRYPSEVVQAQCRNLGCINAQGKEDISMNSVPIQQETLVVRRKHQGCSVSFQLEKVLVTVGCTCVTPVIHHVQ

SEQ ID NO: 1861 - DNA, 671 bp, Homo sapien
acctgctgccgccccagctgctgcatttctagttgctgcaggccttcctgctgtatctctagctgttgcaaacccagctgctgccagaccacctgctgccgccccagctgctgtatctccagctgctacaggccccagtgctgccagccctcctgctgccgcccggcttgctgcatttctagttgctgtcatcccagctgctgtgtgtccagctgccgctgccctttcagctgcccgaccacctgctgtagaacaacctgcttccaccccatctgctgcggcagttcttgctgctgagtgaagctgctctggatttgtgcaccttcttgctctcaaccttcagttcaggcacagagtatctattcagagaacatgtggacttcctgatgtcgtgaaaacagaggcatggactgatttggaaaatattttattagtatgtattctcttttatagaagtttttattcctattgaatctgaatttacagtcaaattccacatcacatgttttagaattctttattctaattcaatatacataaatcttcaaatggtatccttctagatgtttcttcctaatgttttctgtggtatcaattttcatgtggaattgtttgatgttcctcaataaaacttcatagtgttcaaaagcaaaaaaaaaaaaaaaaaaaaa

SEQ ID NO: 1862 - DNA, 5053 bp, Homo sapien
gcggccgcgcgggcggccagcgggcgttgggacgtggagacccggagagggcggcgggacccgggcggggaaaggcgcggcgtggcttggctcaggtgcgcttctcccacctggcagctcgctcagggctgtggggggcgcctgtgagggcgcccgccgttgcggcgtgggagattaatattaagattggaagtttgtgtcttttgctggatattggaaattgaatgtaatggcaacagaatttataaagagttgctgtggaggatgtttctatggtgaaacagaaaaacacaacttttctgtggaaagagattttaaagcagcagtcccaaatagtcaaaatgctactatctctgtacctccattgacttctgtttctgtaaagcctcagcttggctgtactgaggattatttgctttccaaattaccatctgatggcaaagaagtaccatttgtggtgcccaagtttaagttatcttacattcaacccaggacacaagaaactccttcacatctggaagaacttgaaggatctgccagagcatcttttggagatcgaaaggtagaactttccagttcatcccagcacggacctagctatgatgtgtataacccattctatatgtatcagcacatttcacctgatttgagtcgacgctttcctccccgttcagaagtgacgagactgtatggatcggtttgtgatttaaggacgaacaaacttcccggttcccctgggctaagcaaatctatgtttgatcttacaaactcatctcagcgattcatccagagacatgattcattgtccagtgtacccagtagttcttcttcaaggaaaaattctcaggggagtaacagaagcctggatacaattactctatcaggagatgaaagggactttgggagactgaatgtgaaattgttttataattcttcagtagaacagatctggatcacagttttacagtgcagagatttaagttggccctctagttatggagacactcctactgtttctataaaaggaatacttacattgcccaaaccagtgcatttcaaatcttcagccaaggaaggttccaacgctattgaatttatggaaacgtttgtatttgctattaaacttcaaaatctacaaactgtaagacttgtatttaagattcaaacccagactcccaggaagaaaaccattggagaatgctcaatgtcactcagaacccttagcacacaggaaatggattactctttggatataacaccaccttcaaaaatttctgtttgccatgcagaacttgaattggggacttgttttcaagcagtaaatagcagaattcagttacaaattcttgaggcacggtaccttccaagctcatcaacacctctgactttgagttttttcgtgaaggtgggaatgtttagctcgggagagttgatttataagaaaaagacacgcttactgaaggcctccaatggaagagtcaagtggggagagactatgatttttccacttatacagagtgaaaaagaaattgtttttctcattaagctttacagtcgaagctctgtaagaagaaaacactttgtgggccagatttggataagtgaagacagtaataacattgaagcagtgaaccagtggaaagagacagtaataaatccagaaaaggttgttatcaggtggcacaaattaaatccatcttgaagacttcacacattaatttggtgaagaacttgacattcttttagaagacttatgatttcaatttgctaccaatgagaagaggcaaatcaacaaatttgtcaatttatgggggctataattatggtatataatgtatctgatagaaaatttgataagaaaatgtaatgaattttatcagatatccaaagtaaaggaaatgttttaaaactgcaacaagagacacagacagtaaaatcaaagtattattaggatgactaaataaattataaagtctgtgagaatatcaaccatagatagttctttctatattatgtttttgcttttgtattttaagctttacttagatattcaaaacctggtatatcaagtctctgttagtactattggcatttagaagactttaccattatttcagtgctaggcattattgattaggtcttggctccactgtttacctcttgctatgtattttctcccggtaaaaatgaattgaaccatttcaactattttctatatttggagaaagtttgtgccctgtgttttataatttttttacccataagacatcacattatccctttgtaagctacttatctccaaaaaacttcagaaatagaaaactacattttggcaggaataattgaaaacaccagaaggttgaagtttaattggaaacccagaatatacatactttgctgttttcttccctcaaatattttactatttgttttatttggagttaaaataagagtatcatccatatggtccatcctaattcacagaattaaatgagcttaaatagaaaattcagtattttatgataatcacttcgtttttagtttttaaaatttagattattctataatttaccgtgtttgagtattttctcatttttttcataaccatacctgattatactgtgtaacaaatattttctattgcagttttctttccagtacttattagaactcagtatttggaaataatttcagcttaattgaccataagaactgtggccaaaaagaacagttttttggagaggcagatgacattatacctgattttagaaaatctcactttatttttgctaataagtagactaagtgctctgtgttctcagtcttccctttttttctgcccccattcttactttgtcccaggcatgcagagaaagatggtgatattttaggccaggagtataccttgctataacctaagcatgccttctttattccagctcctatgttctgtgtatatcattaacattttcccaaataaacacttaattctcttttccctaggtgccatctcctcaagctacaaaatgtccacatcttatatcccctttgcttctactgctctgattttgtggtaccagtactctctgccactgaacattttgaaatatttttgttttagatttgcaaaaaatgacatataggtcagtactcacatggatttttaagataaatcacctgtgtgataatattttgaatctgagacgaatacaacttttaaaaattgtttttaaaaatagacttttttttttagagcagttgtaggttaacagaaaaattgagaggaagatagagatttcctttctcccctgacaaagccctcaacagcctcccaggctatcagtatcctgcaccacaatggtacatttgttacaatcaatgaacctactctgaaacatcattatcatccaaagttcatggtttacattagagtcccctcttggtgttatacatgctagaggacaaatatatgatgatatgtatgcatcattataatatagtatagtttcgctgcccctaaacatcctctgcaaatgcaactattttaatgggtaccaaagaagtaaatgtatttactggcttttagataataaataacgggctttattgtttattttaaaagctacaatttgttttagctggtttctctgttctattaatgctttgaatttccaaatttaatatatgtagtcatgcatttaacttaatatttaattatttgatttatttaattttctatattcttacaatgtatgtatgatgtataatttaagggaaagctatgacttctcagtttcttagaatcctaggtaaataaaacaataaaaagaaaacccttacatttaaaagagctttcaggtacagaagtattgatacaactaagatcctaaatgttttaattagtgtttacttaagcctttttcaggtgaggaggtactaatgctggttatttccttgaagctttatgtggacctataaataaaaatccaatctcctgctaataggtatgcatattgtgagaaaaacgttaggagctggtagtaaaaaatgagattctatgccaaaataacttctcttcatatttgcctaggcatttcttgacctttacccacttacgcaaggagaaggaaatcataatgatgtcatgtgatcaaaggaaaccatggaagggttcacgctgatagctgatagcttttacagtgctcattcctaacagtggatttacttgtaagctttcagatcaacacaaatagctgcagcctgggttaaaatataacatcactatttggcttttgttttgcatgatttttaaaagcagtactcctagggaaatggcctctgaagtatatcagtttcatctcttaccaagactgttaagaagaaactagtgggattttgaacaagttatataattgtggtctgaaaagaccctaaactgaagttctgtttaaatatagttacatgaatttctctgatactaatgtactcaacagccaggtataaactatatctcctagtaacattttccatttttgtttaatcaaatacttgcttatgaaggatttcagaaatttgtaataaatgtcagcttttgatagcatagcagtaattgacatttcaaaaatatatatttctttctgtgtttggttgggtgtaatgaggaaaatacctgataaaatgtctgaagacactttctaatgttatcttggtgcataagctgtaatttttattcaaaattaaatttcaaatgtttgcagttttggctaaaacattgagttgaaagaattatgaaaagtgggcccatatgaagtaccatgttcattttgaaatatagatttaagatttagaaatatattaaaagagttaatggagcctcctaaattggattttattttgtgggtgaagaattgtaggaagatgaatgtggcctacagttttagtaatctcctagtggagttttttttaacttagtacttttttatttttaagttttttaatctataaaaaatgtgatttctataaaccatgattacaataaataattatattaaaa

SEQ ID NO: 1863 - protein, 566 aa, Homo sapien [sequence omitted]

SEQ ID NO: 1864 - DNA, 1311 bp, Homo sapien
gggggcgcggccggttactcgcttaccggaggcttcagtccccggcggcgcggcgacagctagggttcacggccactggggcagaggagccgcgagaagatgtgggtttttggttacgggtccctgatctggaaggtggatttcccctatcaggacaagctggtcggatacatcaccaactacagcaggcgcttctggcagggcagcacggaccaccgcggggtccccggcaagcctggaagagttgtgactcttgttgaagatcctgcgggatgtgtatggggtgttgcttacagattgccagtaggaaaggaagaagaagtaaaagcataccttgacttcagagaaaaaggaggctacagaaccacaacagtcattttttatccaaaagatcccacaacaaaaccattcagtgtattgctatatattggaacatgtgataatcctgattatcttggtcctgcacctctggaagacattgctgaacaaatttttaatgcagctggtccaagtggaagaaatacagaatatctttttgaacttgcaaattctattaggaaccttgtgccagaagaagcagatgagcatcttttcgctttggaaaaattagtaaaggaacgtttagaagggaaacagaacctcaattgcatataatttagtcttcagagaattaacttcagtgcacaatgacaatatgatttggaaatacgtttacttaaagatcttatttttaatgtagtgaggatattatttaaacttttattttaactggaaatgtcctgaaacacatatttaaaatattgggatacagtgaaagaaaaattcaaattttaataacataaagatttcctaactttatgttattgaacacttactcactagaagtgagttctttagaaaaatacagtgaaggactcagttcagtcttgtttttatcagagtgataatcatcctgtttcacatcccaatactattttgaaattctaaacaattaaaccaaaattccaataaatataaggttatgccttcaatatattcctatacaattctgtaaccatggtttaaaatacacaagcttaaaataacatgcttagaaatacacaataatatgaacagtatttcagccttaattgtgaatttccttgttattcaagtattaaatgaaatcttttgagtttttagccaaaaattggcatttttaaaatacgaaaatttccttggaattataatgtactgtacctcttcttttttaaataaaggcattttactatatggaaaactaaaaaaaaaaaaaaaaaaaaaaaaaaaaaa

SEQ ID NO: 1865 - protein, 184 aa, Homo sapien
MWVFGYGSLIWKVDFPYQDKLVGYITNYSRRFWQGSTDHRGVPGKPGRVVTLVEDPAGCVWGVAYRLPVGKEEEVKAYLDFREKGGYRTTTVIFYPKDPTTKPFSVLLYIGTCDNPDYLGPAPLEDIAEQIFNAAGPSGRNTEYLFELANSIRNLVPEEADEHLFALEKLVKERLEGKQNLNCI

SEQ ID NO: 1866 - DNA, 1588 bp, Homo sapien
  Unsure 89: Unknown base
  Unsure 377-531: Unknown base
  Unsure 1144-1317: Unknown base
gtgaaactccctgccctgttctgtttctctctgaccaccagtgcatgcagcccctgtcatgtaccgcctgtttgctcaaatcaatcatngaccctttcatgtgaaatctttagtgttgtgagcccgttaaaagggacagaaattgtgcattcaaggagcttggattttaaggcagcagcttgctgatgccaccagctgaaaaaagcccttccttctccaactcggtgtctgagaagttttgtctgcagctcatcctgctacagaatgaactccttgtaattctacaagatatgccatgggccttttcacaggggacacaggcttcttaaaacaacccggcttcctcaccctatgtcctttatttacaaagctgtgcnnnnnnnnnnnnnnnnnnnnnnnnnnnnnnnnnnnnnnnnnnnnnnnnnnnnnnnnnnnnnnnnnnnnnnnnnnnnnnnnnnnnnnnnnnnnnnnnnnnnnnnnnnnnnnnnnnnnnnnnnnnnnnnnnnnnnnnnnnnnnnnnnnnnnnnnnnntgcattcctgatttggctcttggcttgaatgttattaacgccacattttttaaatagacaaaaatatgagattaaaaatgttgaattttactaacaataaaagttgttcaaaggaaaactataaggttcttgtttcaactctgtcataggaagaacaggacagtgagctggcacagagttagggaaattgactgtgtctcatattggctagtgagagtgatctgttggaattgtatatcaaaattttaatgtacatacattttgtctagcaattctactattgggtatttatatagtacatataaatataaatgtatatgtttagtaaatatatacttatagttagtaaatatattttatatctatttagtaaatatactaaatgtcaggcctctgagccccaagctaagccatcatatcccctgtgacctgcatgtacatacgtccagatggcctgaagcaagtgaagaatcacaaaagaagtgaaaatggcctgttcctgccttaactgatgacattaccttgtgaaattccttctcctggctcatcctggctcaaaagctcccccactaagcaacttgtgacacccacctctgcccgccagagaacgatnnnnnnnnnnnnnnnnnnnnnnnnnnnnnnnnnnnnnnnnnnnnnnnnnnnnnnnnnnnnnnnnnnnnnnnnnnnnnnnnnnnnnnnnnnnnnnnnnnnnnnnnnnnnnnnnnnnnnnnnnnnnnnnnnnnnnnnnnnnnnnnnnnnnnnnnnnnnnnnnnnnnnnnnnnnnnntttactgcagaatatttcccaaagtctcataatgatgcagaaatacatgtgtacaagacttgttctgacacctggcacagaactgacagtagtggctccccagggaggctggaaggagggtggaggacgtgacagggaaaggagatgctttatggacaagggcctaagctgcagctttgcttggagcgttaccacaaaacaaatacatacatcatgtgatgtttaaatatcacaatatatatttaataataattggtggggctgagcacgg

SEQ ID NO: 1867 - protein, 166 aa, Homo sapien
  unsure 34: unknown amino acid
  unsure 35: unknown amino acid
  unsure 36: unknown amino acid
  unsure 37: unknown amino acid
  unsure 38: unknown amino acid
  unsure 39: unknown amino acid
  unsure 40: unknown amino acid
  unsure 41: unknown amino acid
  unsure 42: unknown amino acid
  unsure 43: unknown amino acid
  unsure 44: unknown amino acid
  unsure 45: unknown amino acid
  unsure 46: unknown amino acid
  unsure 47: unknown amino acid
  unsure 48: unknown amino acid
  unsure 49: unknown amino acid
  unsure 50: unknown amino acid
  unsure 51: unknown amino acid
  unsure 52: unknown amino acid
  unsure 53: unknown amino acid
  unsure 54: unknown amino acid
  unsure 55: unknown amino acid
  unsure 56: unknown amino acid
  unsure 57: unknown amino acid
  unsure 58: unknown amino acid
  unsure 59: unknown amino acid
  unsure 60: unknown amino acid
  unsure 61: unknown amino acid
  unsure 62: unknown amino acid
  unsure 63: unknown amino acid
  unsure 64: unknown amino acid
  unsure 65: unknown amino acid
  unsure 66: unknown amino acid
  unsure 67: unknown amino acid
  unsure 68: unknown amino acid
  unsure 69: unknown amino acid
  unsure 70: unknown amino acid
  unsure 71: unknown amino acid
  unsure 72: unknown amino acid
  unsure 73: unknown amino acid
  unsure 74: unknown amino acid
  unsure 75: unknown amino acid
  unsure 76: unknown amino acid
  unsure 77: unknown amino acid
  unsure 78: unknown amino acid
  unsure 79: unknown amino acid
  unsure 80: unknown amino acid
  unsure 81: unknown amino acid
  unsure 82: unknown amino acid
  unsure 83: unknown amino acid
  unsure 84: unknown amino acid
  unsure 85: unknown amino acid
  unsure 86: unknown amino acid
  unsure 87: unknown amino acid
  unsure 88: unknown amino acid
  unsure 89: unknown amino acid
  unsure 90: unknown amino acid
  unsure 91: unknown amino acid
  unsure 92: unknown amino acid
MTLPCEIPSPGSSWLKSSPTKQLVTPTSARQRTXXXXXXXXXXXXXXXXXXXXXXXXXXXXXXXXXXXXXXXXXXXXXXXXXXXXXXXXXXXLLQNISQSLIMMQKYMCTRLVLTPGTELTVVAPQGGWKEGGGRDRERRCFMDKGLSCSFAWSVTTKQIHTSCDV

SEQ ID NO: 1868 - DNA, 3623 bp, Homo sapien
  Unsure 1803: Unknown base
  Unsure 2958: Unknown base
  Unsure 3405-3449: Unknown base
gaaagaaataataactttaattataagacgtatatgatttttgcagttttacttagtgtgacattgggtttatgagaatcgtgtacattcaagtccaggaataataatggtcatccaaattgtttgaaaggaaaataatcccagtggcaaaatgatggtagaatttgggtaatcttttttttccttttatgaaaagagattttattgaaggtaaaacattagaggttcattgagaatctctaaatccatgttttgacattgtcaagctcattgcaacttccagattgagtaacacttataacacatttccttttcaaagtgcaagatttttaaaagagacttgtcacatattcatttggctggtttcaaatggtgagctgaatgctgggtaatctctactagctccttaatcagatttaaaattctcagtgtttcctagttgtttctgcatactttatgtgagttgttatagctgtaacattacactttatttgctgtttgtgtttcgtgacttttggtaattctggcatttagaaacctttcactttgcttcaaaacgtagttatattttggagttttcatttgatatataattatttattttgcccttttatttcccaaagacattgtaagggttaattagatcattatattttattattacagattaaagttgggcagtaatcttaattatgatggaattatcattatgctaagtaattaactttacctagtttgttttacaactagaacctgccctaaatgttgaatatcttcctagcaagaaacagtctgtcattttacttacacgatgtctaaccaaaccataactttacataaactagtcgtttcggtcaaatagaaaaatgtgtgaatgccataaaaacaaaaattctcagttaaatgatactgggaaatagggaagacagcaaagtgagacttgggctcaggatggttcaggaagaaaaaaaaagaaagacccctgagtaccattaatattcctcagaaattattatttcaaaaggaaatatttctgtattataaatttttcatgagcagccattatgaaatctcacaagaatcatagaattcaataaaaaaggtagaaagtaatttttttacttaaaaatataaattaaaataaatttttaaaatcataagcacataaatagaacttaccagggagaaagaaaaacctgaaggcacaatttcttttctgttcaaaatgtgaacccaggatgtctctagatgatgatggatgataggtggggagattgtttttttttttaatacagaatctcatagttttggattaattagcaccaatcagtttaaacactgactgttagaatagctgcatgggtttttttctttaaactaattaagcgttggctacttagtataagtaagtataagccgaattaaggttctgctacatctgtgtttagaatatttttttaaaactaaataagtgttggctagttttgcggtgtaagcagaattaaggttctgctacctctgtgtttagaatattcccaatggatttttcatttttcaggtgctattttttgaccctgtatccactttaatttaaaccgaatttggtaacgtttctcctctgtctctacatatattcatgctttcacctgctcttttaacacctgcttttagtatctgaggcactttttctgaactctacttgtgcactggatccctcctcctttctctgccaggctgtgtttactttatccttacatcaccacttagtgattcctttctttgtataaacatggtaaatgtctncattagcctaaaaggaaagaccaaataaaacctttcctaccacttggatgcatttgcatcctgacttctgaaatgcctccagcctccattttctcccttcccagttattccttagcccagccatctctgtctttagctcctacaattttcttaggatattctgggaaagatgagcggagactgcccgccttgtcaaatctagtgtctttttttcagtcctcacactgcttgacctatgtataacctcctatacttccctctttgcatactcctctgggttttctgtggtagtcaagattcctccctgagatttatttcccatgagtcttgacccctcccctcagttggtgctatttccccctacccgccctccgatgatcttatcagagcccacaggttcagttttctttcatgctacctgaatgtcctgataaactggctcgctctcttctttaccttccataatggcattaccatttaccacgccacccaagatacttactaggaacctcaaagtattgtattctttttctccatcacactcatacttaatcatcaagtccttttgagcttgtctcctcttgaatatgtcccttcttaattcctgctgccttcttagtaaaggccttcattcttttttccctagtaataatcttttccatatgttccagttaaaataccatgttctccctattccttattacatagctagcattccttgaaaaaaaacaattctctcaggcctccatacctttagcatgttacccactctgcctctgctcttctggaactagaacactcatccttgaaggctgggcttctgtatgaaggttggtcctgcctccttacttgaggtgaagctttgtacatgcctgtattacggacatcctcttatttaagtgtttgtctctttcgtcattgggactccagcacccagcatagtccctagtatactagttggtgctgaataaatagtagctattattagaaaaggaagggtgaaattgacatgggagttagtaaaatgtatatggaaatgatttttaaagggaaaggtaatgattttctggcaggaaaagcagcaatgacaagattacttaagtcttgtgaaataacacttctcttccttgacctgctgcttcccttttttaccanacacacacgcacacataccacagccctttgagactgaaagcagctctattgagaatagtagtgtcaactgtattatgtagaaattctaaagtttttgggattatttcatagccctgaccttgctacttctctccactttatgtggcaggtttaatctcaggtctccctcatacacttctcagcctcagcacctaaccctcacacaacactccagtattgatgcagtcaatcttgtataacattttttgaatgtccaatgtgcaaagcacgatgttggaaattatacagaggtgaataagacaaaaactcttgctctcaaagatgtcagtctttttctttgcaaggataacacatgtagagtaaaatgcataaaggggactaattttaaatgtacagcttaattaatttttatgtatgttaacacccatgtcaccaccatgtttaggnnnnnnnnnnnnnnnnnnnnnnnnnnnnnnnnnnnnnnnnnnnnntgtacctacacctctaaatctattttcaatcttaatggccttttaaataactgggcttctcacaaccatagtgaacagaaacagctgggttgtcaacgtctaacctaatacttcaggaaaactcatgatggtttccatgttaagagagacatggagcagggcactggcatggtg

SEQ ID NO: 1869 - protein, 15 aa, Homo sapien
MMVSMLRETWSRALA

SEQ ID NO: 1870 - DNA, 1009 bp, Homo sapien
accacaaggaaattgtttcccttttgtgaaaagatgggattggagtaaacagtcccttcaaggtctgacaatctttgatccatgtatctggcccagttccaggaggacatgttaaaagggttgggacagcagggtgacaggttccgaggtggatgcggaccacgttgaactcaagccttgcactcagctttcctaaggattcccctcgtactatattttttgtcaggcgactccgcggtcacctttgctccgcggtgattggcctgcagcggggtcctcgtgtttgtccaatatggcggcgcccagtggcggtgtgaactgtgaggagttcgccgagttccaggaattactcaaggtgatgaggacaattgatgacagaatagtacatgaattaaacactacggttccaacagcttcctttgcagggaaaattgatgccagccaaacctgtaaacaactttatgagtctttgatggcagctcatgccagtagagacagagtcataaaaaactgtatagcccagacttcagcagtagtaaaaaacctccgagaagagagagaaaagaatttggacgatttaacgttattaaaacaacttagaaaagagcagacaaagttgaaatggatgcagtcagaactgaatgttgaagaagtggtaaatgacaggagctggaaggtgtttaatgaacgctgccgaattcacttcaagcctccaaagaatgaataaagagagattcttttttttttttttttttaaaggactgggtcatctcataagagctaagcatgacagatatcaacagggcgggcttcctaggatgatttctgagccaacagtccaagaccttttgttgatttcagccccacttagccaagacctcaagtataaataattctgataattatggagaaatcaactgctattttatactgattctgttaaaaaaaaagttttgtaactattaaaataatgttctgactcagtgtaaaaaaagaaaaaccaaacctg

SEQ ID NO: 1871 - protein, 122 aa, Homo sapien
MRTIDDRIVHELNTTVPTASFAGKIDASQTCKQLYESLMAAHASRDRVIKNCIAQTSAVVKNLREEREKNLDDLTLLKQLRKEQTKLKWMQSELNVEEVVNDRSWKVFNERCRIHFKPPKNE

SEQ ID NO: 1872 - DNA, 1336 bp, Homo sapien
tgcctcaggatcaacagtggttagccaaaatggtccagtataatacaccatatatgcttatgtgattcccttgctttgttgttacatttattaggtctatactaaattagccttcaatgatgaagacagactaaagctaagccacatgagatcaaggccatttcaacatggttgcctggaattctccaaaaaacctgtgggttgtgggtttggcatgtcaagcttcagaccacaaggtcttaagtggtaaatagatgcgttgtcctaatactgttccaaggtagagaatcctgatgataaggagtataggaaactcaaatagttcattatttctaaaaaatgtatattttaaggcatgatacaagtcctacaaacctcataagtaggtgaaaaaaaaaaccctgtggagtgataaacattctataaaacctggaaatttgtgtggagttcgcctaagctcacttttcctaaatatagctatataatattgtaaacaaatttgttttttagaaacttttaagaagatttctgtgagcgtaattgacaatatctgcattagaaacagaaagtattatccatcataaatatgagaaaagtgtgtgtcctctttctgacaatctttttatcttatttttttcaaacgttgtggttgttgtttcagcaccattttaaagaatttgaatacaaacaatccctcagcttatcaggttgacatttatgaagctgacctcatcactctttatcttttatgtctgcagtataaatagcatagacatttggtgtgaagggaggagaaaggaagtagtagttctgagaatattcatttgaacagcgtgactatggaagaatgaatagcaaaaaaaggagaatttttttaaaaagatctctcactgggaaaagaaaaagttatgcatttataaagtaattaaactggttttccttgtactttattaatctgaatctaatggcacttccttacgagggttttcagatgtgcttgtagttaatggcaacattatcagaatgactacacagacagtcctactctgaggagatgactttggaagaaacccatttggaactacacaccctgctatgtctgtggagaaatggaactgcaatcctcaagagtcacacttcatattccttcctttcaagtggttgataaaaggtagtgcttcaagcacaggatttatggaatagttggcaaattaaacaacatgctttttattttgactaccatttaagtggaatctttgaactttttttttgacatgtgaatctctaatgtggtgagagagaaaaacataaaaatataaaaacattcaagcaatcg

SEQ ID NO: 1873 - protein, 20 aa, Homo sapien
PQDQQWLAKMVQYNTPYMLM

SEQ ID NO: 1874 - DNA, 2505 bp, Homo sapien
tggcagtgatgtcattccttactaggcttccaaagccactgctgtggccacagcttccatggagacaggcaagctgagcctctatgtggcaccaattcctgcagctgtttgtgttggagggaaaaaaatccaaatggacatcaacagctttcatcaactaaataaccacagaaaatatttatgaagactataaagcaatgattacttttgaattggaaaggaatcactattatttgaaatgtttcttcaaaagtgagcatccggacaggaaccatcatggatgctgaggccatggatgaaggcctactcgggaagatgatatccttgcagtctcaaaacggcaccccacaaaggtgatatcctaatttacaaagggaaaaaggtaccttaatctgaaatctggcaaatgcagcctcaacagaagtgacagaattgaacatcgccaataatgggacacacagacatcacatgcccccagtctgatgcaccacggagtcgtctctgatgtattcttgtcaaaaaatgtttgcctgattctaatcatgaaagaacaattagaaaaaatccaaattgacagatattctgcagaataaatggcctgacctcatcaaaaacatcaatgtcatgaaaaacacaaaacattgcagatagcgtgaaattaaagattacagagatataacttaatgcaagatctctgactggatcctagactgcaggaaaaagtctgctataaagaacatttggatcacttgtagtagctgggaaataaaacaaaacattatttgtaaaaggggggaaatctgaacatgggtcttgcagtatttatgacagtttttgcggggcagagatttctagattgacagctgttttagtactttcaaggtgatgctctgtctgctggtttgcattgtttctgtctgagttaagagactggcagaacacagagttgcagtagccaaacactggagaaagctgggccctacagaaacctaacgctgaagaaacctcaggagccaaactggtggagaaaacaaagagtcctccctctctcccttttcaaataatgatcatacatcttcaagctgtctgaaatggttaaggagttcagtctgtcgtcaggcacacaccagagccagctagcccacacagaccccatcagagcaaaacagacaagagaatttaattcatatccacatagaaaggacttctaggtaggaggtagaccctttagctcccttccaattaaaggagtccccaattctggcacctgagagtcccctgggtctaacagctatgatatttatgtagtgtgttgcttacctaaatgaatacaatttccttccagacacgtgacactgatattaaagtgctaatgagagggatctatttcttcttgtacgctaaaagagaaacagtagttcagatttcccatcagaagtccgaggactttgttcttgataactactaccaataaaaattgagtatttgaaaaattcctttgtattttccatccatacacatttttttttaaagcattttaggaagtcctctaattatatagtaaaaattgtcagcaatggcctgctagttttctatttgacctaatcacaaccatcctcgttaggtcctgaggtctgctctgctgcttggccaaaaccaaatggtgccaggtcacaaagcacttgcacatgtgaatcctgcatccattctacaatgggtcactattgactgaaatactttaataaaaatgatagagcacataaagcttgctgttgacagaaacttccgtgctcaagcaaggcagtgctatacatggtgagaccttgcacaaagtcagttaactaacagatgatctagaagcaggtgacacaatgaaataccctttggagctgttgcctatgtctgtggataggctctttgtagctaggttaggcttctgtgttaaagtgtgttagaagaaagcatcacataaggaaaatagaactctattcgtatgttttttcaaaacagaagtcaagtcacattcaggcaaaccaaatctgtaacattcaagaagatgcagtgactcttccgcatcttagagccacggtgtctgaggtggctggcatggctccaacacgctggcttccctgtcagtggatcatttacaatatggtgcatttcaaattactggtgaattcactgaatactggctgtttttttttttttaggggtaatcttatacataaaatttaggaaaagaaagagaaaaaagcaaaaatgacagaaataactcaaaagttcctaaaatttatgtgtatcttttcgtacctgtgaactcctgaataagtatttatatctgacaggtacaaatacaataattatatttttaagtaaaacctatttaataatatgaagtatggtgttaaatacatgtattaaaagataagtaacttcagaagtcttctgactttttaattgtaaaataagtgaaaactgttttgtgcttttttatttactgtatgc

SEQ ID NO: 1875 - protein, 24 aa, Homo sapien
AVMSFLTRLPKPLLWPQLPWRQAS

SEQ ID NO: 1876 - DNA, 1034 bp, Homo sapien
tttctctcacgtgcctatggaggagagaacacacatagttggattgatccatacataattgggcgtttgcaggcaagtatgaggacaagaagacaaaaaagatgaaagtatttgtaggcatgattcaagattagagtcacagtgttcaagctgctcgctgatgaaaaggaagccaagaaagagctgtgagagtgaggagaggatggaagcctttaggttctccattcaatccaagaacggagcgggagagctgggaaggataacgggtttgcttagagggtaagatatgacatttaatacattcttcagaagtgagatgtttaaaggagtgaccaggttgactgtgtgaccatgagtatgagtaaatgaagtagaatgaaaatggtcaatgtagttgagaaagtcaaataatggtgagtattttaggatatagttgtgatttacaatttcaggtgtgggtcagtcagagtttgctgttgctgacatggttgacatgtttgttttactactgccaccagcaggaggagatgagctgcagggtatcaaaaggggtataatcgagatggcagatctggtagctgtaactaaatctgatggagacttgattgtgccagctcgaaggatacaagcggaatatgtgagtgcactgaaattactccgcaaacgttcacaagtctggaaaccaaaggtaattcgtatttctgcccgaagtggagaggggatctctgaaatgtgggataaaatgaaagatttccaggacctaatgcttgccagtggggagctgactgccaaacgacggaagcaacagaaagtttggatgtggaatctcattcaggaaagtgtgttagagcatttcaggacccaccccacagtccgggaacagattccacttctggaacaaaaggttctcattggggccctgtccccaggactagcagcagacttcttgttaaaagcttttaaaagcagagactaataaaattcatcctgtataataattttacatatcatttcataaagtattttaatagaaa

SEQ ID NO: 1877 - protein, 163 aa, Homo sapien
MVDMFVLLLPPAGGDELQGIKRGIIEMADLVAVTKSDGDLIVPARRIQAEYVSALKLLRKRSQVWKPKVIRISARSGEGISEMWDKMKDFQDLMLASGELTAKRRKQQKVWMWNLIQESVLEHFRTHPTVREQIPLLEQKVLIGALSPGLAADFLLKAFKSRD

SEQ ID NO: 1878 - DNA, 467 bp, Homo sapien
  Unsure 331: Unknown base
aaaggaaaactgtaacttctttaataatacattattcaaattcaaagatgatagcacattttgagattcagattggtaatgtatctttgattacactttgcaaatgtatttgacaattaaccatatactactactttttattactgaggtaggaggcaggactagactctggaggtggggattgggctccagaccacactgaagacaagctgaaagggaagaggtgaaagagtctctccataaaacacactcaccagtgccacgtcaggttaccattgctaaggcaacagctggaagttttggctcctttccatagcaacaatcccacgancctgaagttacgaccttttttctagaaattttggcataatccacccctaaatttgcatatagtttaaagtgggtattaatgtgattgcagtactgcttccgagctgctactctgggcacactgcctattgggagcc

SEQ ID NO: 1879 - DNA, 1246 bp, Homo sapien
tgaagtagaattttattacagaatttcacaaagaacttaatatctaagtgtaaagatagaaagcattgaaattcattagcatctataaatacaagatgattttctcatacctacctctaccacaaccctaaatcaaaacaatttcttatgaagcttcagttttcccagaggtaaattccagtacaatatttggcatgctattaagtgagtgggtgctgaaatcctacttcgttttccttttctttcaaagaaggaaaataaggactgtgcatatcgaaaatcagcgtttctaggaagttgaaagtttgggacagtcttcttggacactcaatcctaaatacatgaaaggcagctactagcgcagccaaggctgtaacacagtcgtccacctttgtgagcctctccctttctaaatataaagaaaattcgcagacctccatgttgaaagggtttttaacttccaacacaggtgtggacacttgcacctgttcattcatgatgacaaaaaggctgggatcatccccaaaaacatctgggaggagtaaacatgtggctgtcatcttcatgtatttcaacatgtcttcatctgtgtaatgtttcattttttcttgcaatacaatattgattggattgtccaccactgaaaaagaagtcagtatattttctgaataggattccaaaatgtgccttgttttcttataaatatctgttcttgtaagaagttggaattctctgaacatctgataagggcacttcaagaaaggaaacagtttaagaatgtccttcagaggtgttcggctgccaatcatctttcttcttatttccaaagtttggctcattctcttgtcaatttctctccagtccttttctgttttcacgtattcttgctggaaccacttaatatgttcatctagctcagaatcaaaacaaacagcttcttcttttatctggacaagtttaatttcatcaaatcttatatcagcaagagatttccttgtctggcctcttcggtgtccaaatttacacttatttctaatcacttgctcatcatcttctatgggtcttcgaacatatttaaagcgatctttgagggctcgtttccataaaaagaagccacagccatcctcatccaggaaagggtgggcctgcagcagggcattaaccacgtcattgtactgctgggtgctggggtacagtgagccttccagatacttagtcatgtcggcctggagaaactcaatgatcc

SEQ ID NO: 1880 - DNA, 891 bp, Homo sapien
gggacagagtgatcaaggcagagtgatctaaaggacacagtagtacttctttaggaccctggcagaatggaagagagcatctggcttctaaggcactgcacaaacttgaatgatcttcttcagaattgacaaggaaaggccatgttatgttcaccctgggttaagttttaagtgtatcttatttaatttttttcaatatgagtcatctccagatactgtgatgatttccaaataaccagaatctagatgactagaaatttactctagctggctttagacaggaagcgtgaggacagaatccagctgcttccactccagggtaggtctgaagccaaccgtcctcggtttcctggcctgtggcatcagtctggttggattacacacaaagccctgcagatctgctgcttttcctgattctcctgtcctgagtgagtgcaaggggctcccctgtcgccgatgtgttctttgaagcagatgctgtgcctgatacctgctggagagtcccaccgccttgagcttctgggtcgagaaaggccaagttgcacactactgagagactgccatgcaccccctggaggcctcagaacattcgacatgctccagtcatggccacggcagtgactgctgattgcctaaccccacatgtgttctcccccttccctgataatcaagcccctgattttcagctgggcacaaaataattcttcctagaacaactccacgtgtgttatcgcccttgcagctgggggtggccaccactggggagaggcagggtgaagaggtcgaaggagcctgagttagcagggatgagcagtggccaggtaaccccagacccattatcctctggatttcttttatgtgaaacaataaaatgtcttgtattcgaaaaaa

SEQ ID NO: 1881 - protein, 28 aa, Homo sapien [sequence omitted]

SEQ ID NO: 1882 - DNA, 958 bp, Homo sapien
  Unsure 348-475: Unknown base
ttatgcaattagggcttgcttaattttggtaatttgtctatcattttgtgtgcatatcagaagataaatatgtgcctttggaaggccttagcactattcacttggagtttttacagaaaatatttgggggtggccagcatacccagttggtgttaatccttgcttattatatccagtgccttgtagagtgcagtaatttcgttgaaaatctgcttgtgaatctttgatgtatacattatccaaaaataacctgactttaaggtcattgctatctggtttaggagtcacatgtttgagaattctgggactattagcaccacacactttgtaattttatatcagatgttnnnnnnnnnnnnnnnnnnnnnnnnnnnnnnnnnnnnnnnnnnnnnnnnnnnnnnnnnnnnnnnnnnnnnnnnnnnnnnnnnnnnnnnnnnnnnnnnnnnnnnnnnnnnnnnnnnnnnnnnnnnnnnnncacacccagcccaaaattattttttggcttacaaaagaagttgctttaaacttctgtttcatctgtaggatatggataacaatagttaagagttgtgagaattagaagttagagaccttactcagaatactagggagcaggtgttagggattttggagctttaccttttaagaacttttgtccatatagtagacaacatactcaccagtgaggacctcaaatagcaatatttctgtggtgaaatttggggatatttatgttaaataaacagcatgtcagtcaaggttgggttttcctgacaaaatttgaaagaatttctctggattttggttttcaggactggtgtgacttaacatacatggcatagatagtatacgtctgttaagtcagtaattacacttacttgagcacaggtactgttcaaggtgctgagaatacagtatagacaaattcctacccttatgaagctgatgttgcaaaaaa

SEQ ID NO: 1883 - protein, 84 aa, Homo sapien
  unsure 20: unknown amino acid
  unsure 21: unknown amino acid
  unsure 22: unknown amino acid
  unsure 23: unknown amino acid
  unsure 24: unknown amino acid
  unsure 25: unknown amino acid
  unsure 26: unknown amino acid
  unsure 27: unknown amino acid
  unsure 28: unknown amino acid
  unsure 29: unknown amino acid
  unsure 30: unknown amino acid
  unsure 31: unknown amino acid
  unsure 32: unknown amino acid
  unsure 33: unknown amino acid
  unsure 34: unknown amino acid
  unsure 35: unknown amino acid
  unsure 36: unknown amino acid
  unsure 37: unknown amino acid
  unsure 38: unknown amino acid
  unsure 39: unknown amino acid
  unsure 40: unknown amino acid
  unsure 41: unknown amino acid
  unsure 42: unknown amino acid
  unsure 43: unknown amino acid
  unsure 44: unknown amino acid
  unsure 45: unknown amino acid
  unsure 46: unknown amino acid
  unsure 47: unknown amino acid
  unsure 48: unknown amino acid
  unsure 49: unknown amino acid
  unsure 50: unknown amino acid
  unsure 51: unknown amino acid
  unsure 52: unknown amino acid
  unsure 53: unknown amino acid
  unsure 54: unknown amino acid
  unsure 55: unknown amino acid
  unsure 56: unknown amino acid
  unsure 57: unknown amino acid
  unsure 58: unknown amino acid
  unsure 59: unknown amino acid
  unsure 60: unknown amino acid
  unsure 61: unknown amino acid
  unsure 62: unknown amino acid
  unsure 63: unknown amino acid
MFENSGTISTTHFVILYQMXXXXXXXXXXXXXXXXXXXXXXXXXXXXXXXXXXXXXXXXXXXXHPAQNYFLAYKRSCFKLLFHL

SEQ ID NO: 1884 - DNA, 1893 bp, Homo sapien
ggaaactgaaaacacacctgcagcatctccggtggaaaggagcgaagaacacggactgggagcacaaagagaagtgctgtgcgcgctgccagcaggtgctggggttcctgctgcaccggggcgccgtgtgccggggctgcagccaccgcgtgtgtgcccagtgccgagtgttcctgagggggacccatgcctggaagtgcacggtgtgcttcgaggacaggaatgtcaaaataaaaactggagaatggttctatgaggaacgagccaagaaatttccaactggagaaggtcagtgcaccagatattctgaaacctctcaatcaagaggatcccaaatgctctactaaccctattttgaagcaacagaatctcccatccagtccggcacccagtaccatattctctggaggttttagacacggaagtttaattagcattgacagcacctgtacagagatgggcaattttgacaatgctaatgtcactggagaaatagaatttgccattcattattgcttcaaaacccattctttagaaatatgcatcaaggcctgtaagaaccttgcctatggagaagaaaagaagaaaaagtgcaatccgtatgtgaagacctacctgttgcccgacagatcctcccagggaaagcgcaagactggagtccaaaggaacaccgtggacccgacctttcaggagaccttgaagtatcaggtggcccctgcccagctggtgacccggcagctgcaggtctcggtgtggcatctgggcacgctggcccggagagtgtttcttggagaagtgatcattcctctggccacgtgggactttgaagacagcacaacacagtccttccgctggcatccgctccgggccaaggcggagaaatacgaagacagcgttcctcagagtaatggagagctcacagtccgggctaagctggttctcccttcacggcccagaaaactccaagaggctcaagaagggacagatcagccatcacttcatggtcaactttgtttggtagtgctaggagccaagaatttacctgtgcggccagatggcaccttgaactcatttgttaagggctgtctcactctgccagaccaacaaaaactgagactgaagtcgccagtcctgaggaagcaggcttgcccccagtggaaacactcatttgtcttcagtggcgtaaccccagctcagctgaggcagtcgagcttggagttaactgtctgggatcaggccctctttggaatgaacgaccgcttgcttggaggaaccagacttggttcaaagggagacacagctgttggcggggatgcatgctcacaatcgaagctccagtggcagaaagtcctttccagccccaatctatggacagacatgactcttgtcctgcactgacatgaaggcctcaaggttccaggttgcagcaggcgtgaggcactgtgcgtctgcagaggggctacgaaccaggtgcagggtcccagctggagacccctttgaccttgagcagtctccatctgcggccctgtcccatggcttaaccgcctattggtatctgtgtatatttacgttaaacacaattatgttacctaagcctctggtgggttatctcctctttgagatgtagaaaatggccagattttaataaacgttgttacccatgtcaaaaaggagataacccaccagaggcttaggtaacataattgtgtttaacgtaaatatacacagataccaataggcggttaagccatgggacagggccgcagatggagactgctcaaggtcaaaggggtctccagctgggaccctgcacctggttcgtagcccctctgcagacgcacagtgcctcacgcctgctgcaacctggaaccttgaggccttcatgtcaatgca

SEQ ID NO: 1885 - protein, 381 aa, Homo sapien
MRNEPRNFQLEKVSAPDILKPLNQEDPKCSTNPILKQQNLPSSPAPSTIFSGGFRHGSLISIDSTCTEMGNFDNANVTGEIEFAIHYCFKTHSLEICIKACKNLAYGEEKKKKCNPYVKTYLLPDRSSQGKRKTGVQRNTVDPTFQETLKYQVAPAQLVTRQLQVSVWHLGTLARRVFLGEVIIPLATWDFEDSTTQSFRWHPLRAKAEKYEDSVPQSNGELTVRAKLVLPSRPRKLQEAQEGTDQPSLHGQLCLVVLGAKNLPVRPDGTLNSFVKGCLTLPDQQKLRLKSPVLRKQACPQWKHSFVFSGVTPAQLRQSSLELTVWDQALFGMNDRLLGGTRLGSKGDTAVGGDACSQSKLQWQKVLSSPNLWTDMTLVLH

SEQ ID NO: 1886 - DNA, 4383 bp, Homo sapien
  Unsure 3058-3098: Unknown base
  Unsure 3105: Unknown base
  Unsure 3107: Unknown base
  Unsure 3109: Unknown base
  Unsure 3111: Unknown base
  Unsure 3113: Unknown base
caactacggctaggtacgaggctgggtgtcggaggctccgttgcctgctcccggagggagacgcgctgccgaggagaacccagcgggagaacatttcaggataggaataggccaagtgctgagaagatgagtcttaggattgatgtggatacaaactttcctgagtgtgttgtagatgcaggaaaagtcacccttgggactcagcagaggcaggagatggaccctcgcctgcgggagaaacagaatgaaatcatcctgcgagcagtatgtgctctgctgaattctggtgggggcataatcaaggctgagattgagaacaaaggctacaattatgaacgtcatggagtaggattggatgtgcctccaattttcagaagccatttagataagatgcagaaggaaaaccactttttgatttttgtgaaatcatggaacacagaggctggtgtgccacttgctaccttatgctccaatttgtaccacagagagagaacatccaccgatgtcatggattctcaggaagctctggcattcctcaaatgcaggactcagactccaacgaatattaatgtttccaattcattaggtccacaggcagctcagggtagtgtacaatatgaaggtaacataaatgtgtcagctgctgctttatttgatagaaagcggcttcagtatctggaaaaactcaaccttcctgagtccacacatgttgaatttgtaatgttctcgacagacgtgtcacactgtgttaaagacagacttccgaagtgtgtttctgcatttgcaaatactgaaggaggatatgtattttttggtgtgcatgatgagacttgtcaagtgattggatgtgaaaaagagaaaatagaccttacgagcttgagggcttctattgatggctgtattaagaagctacctgtccatcatttctgcacacagaggcctgagataaaatatgtccttaacttccttgaagtgcatgataagggggccctccgtggatatgtctgtgcaatcaaggtggagaaattctgctgtgcggtgtttgccaaagtgcctagttcctggcaggtgaaggacaaccgtgtgagacaattgcccacaagagaatggactgcttggatgatggaagctgacccagacctttccaggtgtcctgagatggttctccagttgagtttgtcatctgccacgccccgcagcaagcctgtgtgcattcataagaattcggaatgtctgaaagagcagcagaaacgctactttccagtattttcagacagagtggtatatactccagaaagcctctacaaggaactcttctcacaacataaaggactcagagacttaataaatacagaaatgcgccctttctctcaaggaatattgattttttctcaaagctgggctgtggatttaggtctgcaagagaagcagggagtcatctgtgatgctcttctaatttcccagaacaacacccctattctctacaccatcttcagcaagtgggatgcggggtgcaagggctattctatgatagttgcctattctttgaagcagaagctggtgaacaaaggcggctacactgggaggttatgcatcacccccttggtctgtgtgctgaattctgatagaaaagcacagagcgtttacagttcgtatttacaaatttaccctgaatcctataacttcatgaccccccagcacatggaagccctgttacagtccctcgtgatagtcttgcttgggttcaaatccttcttaagtgaagagctgggctctgaggttttgaacctactgacaaataaacagtatgagttgctttcaaagaaccttcgcaagaccagagagttgtttgttcatggcttacctggatcagggaagactatcttggctcttaggatcatggagaagatcaggaatgtgtttcactgtgaaccggctaacattctctacatctgtgaaaaccagcccctgaagaagttggtgagtttcagcaagaaaaacatctgccagccagtgacccggaaaaccttcatgaaaaacaactttgaacacatccagcacattatcattgatgacgctcagaatttccgtactgaagatggggactggtatgggaaagcaaagttcatcactcagacagcaagggatggcccaggagttctctggatctttctggactactttcagacctatcacttgagttgcagtggcctcccccctccctcagaccagtatccaagagaagagatcaacagagtggtccgcaatgcaggtccaatagctaattacctacaacaagtaatgcaggaagcccgacaaaatcctccacctaacctcccccctgggtccctggtgatgctctatgaacctaaatgggctcaagggtgtcccaggcaacttagagattattgaagacttgaacttggaggagatactgatctatgtagcgaataaatgccgttttctcttgcggaatggttattctctgaaggatattgctgtgcttttcaccaaagcaagtgaagtggaaaaatataaagacaggcttctaacagcaatgaggaagagaaaactgtctcagctccatgaggagtctgatctgttactacagatcggtgatgcgtcggatgttctaaccgatcacattgtgttggacagtgtctgtcgattttcaggcctggaaagaaatatcgtgtttggaatcaatccaggagtagccccaccggctggggcctacaatcttctgctctgtttggcttctagggcaaaaagacatctgtatattctgaaggcttctgtgtgacaggaaacccaagcctaagaaacaattaagtggttctcatctctaattaactgtgaaaccatttaatccaaacatgtaagcacacactcacttattaagtcacatacttttctaggtgctggggattgagaacgaatcgatgtaagattcctcctttagggcagagacagaccactgacaaatacacagatagacaaggaatttcccatggtaaaaagggatatcagtaattagaggaccgtgagactcagagannnnnnnnnnnnnnnnnnnnnnnnnnnnnnnnnnnnnnnnntgtccgngngngngnacgtgcacatgtgtgtaggtagatggagggggtgattattttgggtggtcagggaagtgctcagtgagggaagaacttgtcatgagaatctctgagcgtgccaggcagactcggatatttttataaatttttaacatggccacttgcagaagagcttgaatgggacgtgcagggagaatgggaaggatggagcaggtagctcatctggccttgtaggtgccgggaacgggcaagacatgttttgaaatgtaagatcacagactgttttttgcaagaccacattatattactttattattttctgctttttcttttaacgacattagtgtttttgatcactatattttaaaatgctttttgtgagccttttggttatgtggaatctgttccttagctctgattttttattcttatggagcgtcttaggttactacatgaaggtaagactgccacagtcccccagggaggcacactgtgttttactgattgatttgaagatgatagagagcctagggggatgagtctattggactcaaaggttacattttgtttttccatttaatttaataatcaacaaaacgacaaagtcagtttaatatctttcttctgctgagtcttcaggatgttagctagtctttcaaaagccattgctacaaaagtgcaaatttctcatttcctgtgggtctctagaaactctctcaatatttaaagccaaacaaatccatcttttctgagagacagaaactaaaaaattcagagttaattcactattaaaaacagcaaggccctgctatttcccaagaataaagaaatttaaaattctcattgtaagaagtatgaacttgaagctagaattggtttatttctggcagctacttacaatattaagaactttactttttaaatttgagacaatttcacaggaaagcaagaaattagtctattgtgaaatgtttttacaactaacttggaatatactgcaaatcactagtaagtagagacacatttaagataaaatgattaataaaacaattggtaattctgaataaggatctgaataaatccagatcacagactgttcctttaccaatatgtaaaagaatgtgcaaaattcgtaaaaatatacccaaaaatttaccagcaacagagaagcaaagaatggagttcaaccttacactataaacatctaatagatatgtatgaaaatttaaaaactagaaaaggttgggcatggtggctcatgcttgtgatccccaggactttaggaggc

SEQ ID NO: 1887 - protein, 803 aa, Homo sapien
QLRLGTRLGVGGSVACSRRETRCRGEPSGRTFQDRNRPSAEKMSLRIDVDTNFPECVVDAGKVTLGTQQRQEMDPRLREKQNEIILRAVCALLNSGGGIIKAEIENKGYNYERHGVGLDVPPIFRSHLDKMQKENHFLIFVKSWNTEAGVPLATLCSNLYHRERTSTDVMDSQEALAFLKCRTQTPTNINVSNSLGPQAAQGSVQYEGNINVSAAALFDRKRLQYLEKLNLPESTHVEFVMFSTDVSHCVKDRLPKCVSAFANTEGGYVFFGVHDETCQVIGCEKEKIDLTSLRASIDGCIKKLPVHHFCTQRPEIKYVLNFLEVHDKGALRGYVCAIKVEKFCCAVFAKVPSSWQVKDNRVRQLPTREWTAWMMEADPDLSRCPEMVLQLSLSSATPRSKPVCIHKNSECLKEQQKRYFPVFSDRVVYTPESLYKELFSQHKGLRDLINTEMRPFSQGILIFSQSWAVDLGLQEKQGVICDALLISQNNTPILYTIFSKWDAGCKGYSMIVAYSLKQKLVNKGGYTGRLCITPLVCVLNSDRKAQSVYSSYLQIYPESYNFMTPQHMEALLQSLVIVLLGFKSFLSEELGSEVLNLLTNKQYELLSKNLRKTRELFVHGLPGSGKTILALRIMEKIRNVFHCEPANILYICENQPLKKLVSFSKKNICQPVTRKTFMKNNFEHIQHIIIDDAQNFRTEDGDWYGKAKFITQTARDGPGVLWIFLDYFQTYHLSCSGLPPPSDQYPREEINRVVRNAGPIANYLQQVMQEARQNPPPNLPPGSLVMLYEPKWAQGCPRQLRDY

SEQ ID NO: 1888 - DNA, 743 bp, Homo sapien
  Unsure 718: Unknown base
gtcctgawcaccgcactcctcatcgtcctcacctaccctgcctggaccttcatcgactgcctggactcggccagccccctcttccccgtgtgtgtcatagttgtgccattcttcctgtgttacaattaccctgtttctgattactacagcccaacccgggcggacaccaccaccattctggctgccggggctggagtgaccataggattctggatcaaccatttcttccagcttgtatccaagcccgctgaatctctccctgttattcagaacatcccaccactcaccacctacatgttagttttgggtctgaccaaatttgcagtgggaattgtgttgatcctcttggttcgtcagcttgtacaaaatctctcactgcaagtattatactcatggttcaaggtggtcaccaggaacaaggaggccaggcggagactggagattgaagtgccttacaagtttgttacctacacatctgttggcatctgcgctacaacctttgtgccgatgcttcacaggtttctgggattamcctgagtctcaaacagttggaaactagcccactggacatgaaagccaagacataggaaagttattggtaggcaaatcttgacaacttatttttctttaacaacaacaaaaagtcatacggctgtcttgctactaccagataaatgatgctgctgtgtgaaaggaaaaaaaaaaaaaaaaaaactcnagggggggccggtaacaaattcccc

SEQ ID NO: 1889 - protein, 178 aa, Homo sapien
  unsure 3: unknown amino acid
  unsure 178: unknown amino acid
VLXTALLIVLTYPAWTFIDCLDSASPLFPVCVIVVPFFLCYNYPVSDYYSPTRADTTTILAAGAGVTIGFWINHFFQLVSKPAESLPVIQNIPPLTTYMLVLGLTKFAVGIVLILLVRQLVQNLSLQVLYSWFKVVTRNKEARRRLEIEVPYKFVTYTSVGICATTFVPMLHRFLGLX

SEQ ID NO: 1890 - DNA, 1081 bp, Homo sapien
gaccgctgacctagagggagttatgcacatgggcttataaggttagccaagagaaaggacaagaagacccaaagtcggcaagcaaatttattaacctgctgggctgctctacagaaatctgaggaggcagacaccgggcttacaggctaaggggtataagtaggtctgcaggggttttgtgtgtgtgtgcgggggtgtcgggggggcaaggccatttgtggagacttttcctcccagtatggccacatcctgcagtttgtcagtttttgcccccgcctggctcagggtaccaggatgtggtttagcttaggggtggttatagtggcacctaagttctgggaacttgcggtgggggcgaccttttggacgaaaaataagctgcagggcagctaggggagggggcttgttatattcctctgggggcagggtgtccctaactgggctcagtcggaaggaacttgaccaaagtctgggctcagttgggcatcactcaggctaatggtcgtgtgctggatgccatcagagggaagtaccaatggtaaagtggaaacaatgtgcagctttcaactgggtggaggctgctattctgtggacagtgagatgtttccttggcactgtcaatagacaatctgcgtagagaaattccaagctgaaagccaataatgttataataaaatagagattcttcagaagatgaaaggaattaccagcatggaaattgtgtcataggcttaagggctaaagaagaagccttttcttttctgttcaccctcaccaagagcacaacttaaatagggcattttataacctgaacacaatttatattggacttaattattatgtgtaatatgtttataatcctttagatcttataaatatgtggtataaggaatgccatataatgtgccaaaaatctgagtgcatttaatttaatgcttgcttatagtgctaaagttaaatgatcttaattctttgcaattatatatgaaaaatgactgatttttcttaaaatatgtaacttatataaatatatctgtttgtacagattttaaccataaaaacatttttggaaaaccataaa

SEQ ID NO: 1891 - protein, 12 aa, Homo sapien
TADLEGVMHMGL

SEQ ID NO: 1892 - DNA, 2547 bp, Homo sapien
agctgcagccacccgcgtgcggcacgcgccggccgcctgcccggatcgcggccaccagtgccgcggcctctcgactcccgccccgccgagccgcgcgcgcgactgccatcctcctcaattgctttttacgattttttttgtgcatgcattcattttctgttccgttttgtcctttttaaggcggtggcggcggcgacagcggcgtaagctcgcagcggggagggggcggccggaggatgcggcgcggggctgcgctcgctacgtccgctgctgctgcccggctcgggcctgagcgccgagcaggatcccaagtgatggtggtttcctcggagggcgagctgagtcctgcgcgactggttagcacggtggagctggtagccacgcctgctggctggcgtgcgtgaacaggtgtggaccgcaggatctcagcactctgacccaaggggaagcatgtcgaagaaaggccggagcaagggcgagaagcccgagatggagacggacgcggtgcagatggccaacgaggagctgcgggccaagctgaccagcattcagatcgagttccagcaggaaaaaagcaaggtgggcaaactgcgcgagcggctgcaggaggcgaagctggagcgcgagcaggagcagcgacggcacacggcctacatttcggagctcaaggccaagctgcatgaggagaagaccaaggagctgcaggcgctgcgcgaggggctcatccggcagcacgagcaggaggcggcgcgcaccgccaagatcaaggagggcgagctgcagcggctgcaggccacgctgaacgtgctgcgcgacggcgcggccgacaaggtcaagacggcgctgctgaccgaggcgcgcgaggaggcgcgcagggccttcgatggagagcgcctgcggctgcagcaggagatcctggagctcaaggcagcgcgcaagcaggcagaggaggcgctcagtaactgcatgcaggctgacaagaccaaggcagccgacctgcgtgccgcctaccaggcgcaccaagacgaggtgcaccgcatcaagcgcgagtgcgagcgcgacatccgcaggctgatggatgagatcaaagggaaagaccgtgtgattctggccttggagaaggaacttggcgtgcaggctgggcagacccagaagctgcttctgcagaaagaggctttggatgagcagctggttcaggtcaaggaggccgagcggcaccacagtagtccaaagagagagctcccgcccgggatcggggacatggtggagctcatgggcgtccaggatcaacatatggacgagcgagatgtgaggcgatttcaactaaaaattgctgaactgaattcagtgatacggaagctggaagacagaaatacgctgttggcagatgagaggaatgaactgctgaaacgctcacgagagaccgaggttcagctgaagcccctggtggagaagaacaagcggatgaacaagaagaatgaggatctgttgcagagtatccagaggatggaggagaaaatcaagaacctcacgcgggaaaacgtggaaatgaaagaaaagctgtcagcgcaggcgtctctgaagcggcatacctccttgaatgacctcagcctgacgagggatgagcaggagatcgagttcctgaggctgcaggtgctggagcagcagcacgtcattgacgacctctcactggagagagaacggctgttgcgctccaaaaggcatcgagggaaaagtctgaaaccgcccaagaagcatgttgtggagacattttttggatttgatgaggagtctgtggactcagaaacgttgtccgaaacatcctacaacacagacaggacagacaggaccccagccacgcccgaagaagacttggacgatgccacagcccgagaggaggctgacctgcgcttctgccagctgacccgggagtaccaggccctgcaacgcgcctacgccctgctccaggagcaggtgggaggcacgctggacgctgagagggaggcccggactcgggagcagctacaagctgatctgctgaggtgtcaggccaaaatcgaagatttggagaagttactggttgagaagggacaggattccaagtgggttgaagagaagcagctgctcatcagaacaaaccaagacttgctggaaaagatttacagactggaaatggaagagaaccagctgaagaatgaaatgcaagacgccaaggatcagaacgagctgttagaattcagagtgctagaactcgaagtaagagactctatctgttgtaaactctcaaacggagcagacattctctttgaacccaaactgaaattcatgtaaagctctcagatgttttcaagcatgtgtaaaggggacatgttatagtttctttctttctttctttctttttttttttaaatctgtatgttcagaataatttcactgccttaatgtgttctggagagcgtgctcacccaagtctatggacatgtaccagagctaatatatttattgcctatggcttgttttgcacttaataaaataatttgtttttgc

SEQ ID NO: 1893 - protein, 626 aa, Homo sapien
MSKKGRSKGEKPEMETDAVQMANEELRAKLTSIQIEFQQEKSKVGKLRERLQEAKLEREQEQRRHTAYISELKAKLHEEKTKELQALREGLIRQHEQEAARTAKIKEGELQRLQATLNVLRDGAADKVKTALLTEAREEARRAFDGERLRLQQEILELKAARKQAEEALSNCMQADKTKAADLRAAYQAHQDEVHRIKRECERDIRRLMDEIKGKDRVILALEKELGVQAGQTQKLLLQKEALDEQLVQVKEAERHHSSPKRELPPGIGDMVELMGVQDQHMDERDVRRFQLKIAELNSVIRKLEDRNTLLADERNELLKRSRETEVQLKPLVEKNKRMNKKNEDLLQSIQRMEEKIKNLTRENVEMKEKLSAQASLKRHTSLNDLSLTRDEQEIEFLRLQVLEQQHVIDDLSLERERLLRSKRHRGKSLKPPKKHVVETFFGFDEESVDSETLSETSYNTDRTDRTPATPEEDLDDATAREEADLRFCQLTREYQALQRAYALLQEQVGGTLDAEREARTREQLQADLLRCQAKIEDLEKLLVEKGQDSKWVEEKQLLIRTNQDLLEKIYRLEMEENQLKNEMQDAKDQNELLEFRVLELEVRDSICCKLSNGADILFEPKLKFM

SEQ ID NO: 1894 - DNA, 2377 bp, Homo sapien
cttcagactcaagactgcaacaccgtgcctgccctctagctatgctttaaggcaggcctatcagcccagactggagtcatgtaatacatggctctgtcagtagctctccttcccacaaataagttttgatgatcttacactcatccctgccgttagcattcaggaccaatcttctatagcctatacgccacactggtctaggacagcacctaaataatactcatgctataaaaaattcatcaagttatatatttttaaaaacatccctaaaattatctttttcctttactgaaaagaatttcaggatcccctctctctcactgcctctcttcacacacacctaccttagttggtcacctattttgtaaacatatcttctttaaaaaaagaaagaaatggcagtacatgaaaaactgcttcgtaaacagaaactatattatttatatttgtagcatttttttccccttgaggttaatttcctttgcttcccataactggaagccaatgattcagtgccattatataagcttattttccctcttggaaatagtaaattataagaggtttgacccaaaaatatacatcaaaattaggcagtattcggtgtttagcctccatctgccttgtcttcttgtctttagttgtgcaagtagatgctgatgatttctggcagagctaaagtaagtaaatcatgtgaatttattttttttcctcataaaacagatggcatggtctagctctgggcttgtatgtttcatgaagtacatgggtctgagtgcgtatttattttgtgagccaaggtttatgccttcttctataattttctttcaccgaaaattacctggagagctagaaactccatttgtgtcagcgtaagaagctttagaatctatatccagaccaaggccatggaacaatgtagattcactcagtaaaaactcactagcggccttctttgtactagtctgtcacctttgcttggctttgggaagcttcaaactagggcagtttatgtttgggagtgaccagtcaaatagcaagacagacataggcaaggatgtaatttttaaaaatttaagtggggaatggtgaagcatgaatcaaaacagaaggtagtcttaccttcttggaactgtaaaataaatacatttgaaaaaggcaccctctcaaccttctgcgagtcagaatttttgctgccacccctcattttgaatctctattctgcattttttattcttttttttaggaaggaggaagaaaaatttctcctgaagaattcattggaaattaaaattaacttgcgtattttgtattctttggaatgtgatgaagactgatttgaaagggcagtgctggatttggtcaggcataggaaaggaagacatgcagtcgtcctgcctagctcatccccgccacgatggagaagtggggttgctttcgttgtactttttttcatttgtttcttgccaagcccagtggcttctgttataacatgtggcagcttctcccttggagactgattcagtccaagttaccataatatttaggaccagctacagagacgtttcttcccctaaacccatgccaaatctaaatcaaactatcttcttctccttagccgttcaaatagctccagctcttatataaaaatacgagaaatacacaggcctcttttcgttttattcctgttcaaacagataaacaaacaaggcacatcatgcctaggttgctttgagcttgatcacttcctcctaaagcagtcttacgctgtgttgattttaagaattgcaacttaggtgttctagaacatattctgagagcatagtcatagtctgtgatctcagaatatgtttgcttccttctagaacatctgagttctagaaattgcgtacaataaactgctgtcagtgctgctggaggaaggaagagtaactctgacatcactggccttcaacaggtgtggcgctgagcttctgggcctcagaagccctgacttctagaggctgggggccagcggggcagggaggtgatctcatcatggatggccacagatcatccacctgccaaacagttaaccctgaacaagtcatgtcaatttattttgcttttaaaaaagaaagtctgcaaaatagaaaaaaaaaaaaagattcttcataaatacatttgttctgatctgtaaataccctggtcatttcccccttggcatttgatacacatagtatagacatattttagtcatccttgctcaagtaattatattccataaccaactttattagcataaattaacttcctcatatttttagcaagagttactttccttcattgcttagcttattgttttgaaatatgaattacttcagcacagttcattttt

SEQ ID NO: 1895 - protein, 33 aa, Homo sapien
FRLKTATPCLPSSYALRQAYQPRLESCNTWLCQ

SEQ ID NO: 1896 - DNA, 1313 bp, Homo sapien
agccgggtctcgccagtctcgcccggtgtcgtccccggccggtggctagtgggggtactgtggtagcggagccgggctgtgctagcgggctgggtagctcgaggcttccctaggcggtcgtcaggtctgggagggacgctgggtatgggccgtatgagcggggcgggcgcgactgctatgagcccggccggagtcgccgcccagggacctgccacccggatcccaccttccaggaggacggacgtcacccagacgctcgcaactccggtctcttgacagcgcagccttccacaggctcgaatttttaagacttgacataaagtctccggaattccagattattaaagtgaccccctcatttcaacccggcaaaacttctcaccccagtgtcataagattcgatagcgatctcccagaaacttggactggaatgctcctacactgaggggatggggggaagaagaaatgctaaagattatttcagagttacagaaatcctgttgaaattccaatgcatcgtttactcttagcgctggggcttcacagtttttttttaagttggaaatatttacaaaatttcccatagggtgaaatccagagttaatccaaaaccagaatcttttaaaattaagtacattcaaatgtgcagatttcttaaacctcatttagttgagctttgataggtgaaacgcacgttttgaacaactctggtaacaaagaaaaacattaaattgattataggtatgttatatttaaagaccagttgtgaaattagctatattgtgctcaaagtatgttactgacatttctccgtcgttaaaaggaactgctccattctagttttttataatagtctgtattatgtatatagcctgatagtgctgaatttctgaattgaccttcatcttatttactcaataatattcatttgacaaatacttattaagtgcatatatgtgtcaggaactgtactagatgctgaggatatagcagtaagcgcaacagaccaagctaacagcttagtaaagggtgaggtaaaacaaaacaaaaaagtattcaaaaaaataaactaatttttatcttaatttaaaaaattacaaatttttaaaaatcacaaattggtatccatgtataattcatttccgtgcattttcttgtgtgaagaaagctcagtaaaagtatttcttaggtttctgtaattctagttctctactcgattttcttctgcaattttctgagccagaacccttcttagaaggcatattagagactttaaaagttaaataataaaataaatctcttctttaaacagc

SEQ ID NO: 1897 - protein, 40 aa, Homo sapien
MSGAGATAMSPAGVAAQGPATRIPPSRRTDVTQTLATPVS

SEQ ID NO: 1898 - DNA, 5092 bp, Homo sapien
  Unsure 4191-4322: Unknown base
gggggggctcgtgcgttctgcgcccgccgcggcggtgccgagcccgctggctcccgattgtcctctgcggcggtggcggtcgctgcctccttgcctccgggcccggggctgcaggggccagagcgagtgcgcctcctgcccgcggaccgcggcagcccagagcagaaacggcttacaaaatatacagatcttggtagacaacgtggctgcaggctgttgaattggaattccctgtggctgtccgaaggcagggtgtccggagagcggtgggctgacctgttcctacaccttgcatcatgccagctttgtcaacgggatctgggagtgacactggtctgtatgagctgttggctgctctgccagcccagctgcagccacatgtggatagccaggaagacctgaccttcctctgggatatgtttggtgaaaaaagcctgcattcattggtaaagattcatgaaaaactacactactatgagaagcagagtccggtgcccattctccatggtgcggcggccttggccgatgatctggccgaagagcttcagaacaagccattaaacagtgagatcagagagctgttgaaactactgtcaaaacccaatgtgaaggctttgctctctgtacatgatactgtggctcagaagaattacgacccagtgttgcctcctatgcctgaagatattgacgatgaggaagactcagtaaaaataatccgtctggtcaaaaatagagaaccactgggagctaccattaagaaggatgaacagaccggggcgatcattgtggccagaatcatgagaggaggagctgcagatagaagtggtcttattcatgttggtgatgaacttagggaagtcaacgggataccagtggaggataaaaggcctgaggaaataatacagattttggctcagtctcagggagcaattacatttaagattatacccggcagcaaagaggagacaccatcaaaagaaggcaagatgtttatcaaagccctctttgactataatcctaatgaggataaggcaattccatgtaaggaagctgggctttctttcaaaaagggagatattcttcagattatgagccaagatgatgcaacttggtggcaagcgaaacacgaagctgatgccaaccccagggcaggcttgatcccctcaaagcatttccaggaaaggagattggctttgagacgaccagaaatattggttcagcccctgaaagtttccaacaggaaatcatctggttttagaaaaagttttcgtcttagtagaaaagataagaaaacaaataaatccatgtatgaatgcaagaagagtgatcagtacgacacagctgacgtacccacatacgaagaagtgacaccgtatcggcgacaaactaatgaaaaatacagactcgttgtcttggttggtcccgtgggagtagggctgaatgaactgaaacgaaagctgctgatcagtgacacccagcactatggcgtgacagtgccccataccaccagagcaagaagaagccaggagagtgatggtgttgaatacattttcatttccaagcatttgtttgagacagatgtacaaaataacaagtttattgaatatggagaatataaaaacaactactacggcacaagtatagactcagttcggtctgtccttgctaaaaacaaagtttgtttgttggatgttcagcctcatacagtgaagcatttaaggacactagaatttaagccctatgtgatatttataaagcctccatcaatagagcgtttgagagaaacaagaaaaaatgcaaagattatttcaagcagagatgaccaaggtgctgcaaaacccttcacagaagaagattttcaagaaatgattaaatctgcacagataatggaaagtcaatatggtcatctttttgacaaaattataataaatgatgacctcactgtggcattcaatgagctcaaaacaacttttgacaaattagagacagagacccattgggtgccagtgagctggttacattcataactaagagaaatttccataattgtctttttctatagagtgcatgatgaaatcaattacagttttggtagtagggtttttaaatctatatcactgtcatagatgtacaatcttggttcaagttgaatgctggttttgtttgtatctttttacagccttatttcaaacgccatgtgttagtataagatccgaaatcaaaatatgcacagtactgtattctaagcaaaacctcaaaccttctcgttgtcttcaataccgctctatctccaagatgaggctgaaattttcagagagacttagctagaggcttagtatgtatgggagttcagcgcttctgctggtctcaggtgtggctgctgctgtcgagtttgaatgttagctgttgaaggtatcaattcagcagccatgagcagctccagacagacaggtgagctctgctgtttctgggtggatcatcacagatttagccgggcaggcagtaaggtgtcctcttactattcaaaaagtgtagactttcttacatattcgcaatacgttcacagtgtgtgcattttaaaataattcttaaaggagtaactgaaattttaccttgagtgaatggccttcataatatagcttgagaagtccttttgagtacctgtcagtgactcaacaacatttaataagggaaagtagacttttaacagttattatatatgtaacgaaaagcctttcctttgggattaatataagtaagaatggtagccttgtggcaagaaatgattacaaaggatatttttatttgtaattcctcagaagacaatttatgaagtcacccaaaatgttattttagctggttttggatttttccaataaattagaagaaggatttctattctaaaacatgtaaaacctgttttacatattactgatacaattaaagattatttttcatctatgtgcaatagatcacccctctttaaattgctctaagatttattttagaaaacttttcatgtgatgttatttctttgtcatcaaaatgcttgttaacactgtccagacaccatcctaaccttgccattgttaaagaagtttaggaaagactcttatattgtaaatatttagatgggttctctcacttttctttgatactactgattttcagcaagtgaattatataattcaaaatgctagaaatgtctatccgttctataagagagcatatcctgccgttcttgcatgcagtgaagccctgcccgtcgaaaatcattgcatctgtgactttcaaagtggaaaaaaaaatgttatttttttgttgatttgtaaagagagtttaaatgtcatgtgaaaaaaaatagaatgtagtaaaattctatatatttatgaaatattttaaaggcatatttttttaaatatcaaacggggctattcataaaataaactgattgtatgtcaagatgtcctaatttaaaagagtagttttataaatcatggtcaacattccatgtaaatatttgagctttacaaagatagatccaagtgtgcgatctgtgcactgcacatttgatagcattattcactggttttccttcatacttgtcaagttcatattagaagcagagacaaaaaccactccaatggccttgacacatagtcacaccaaaatagataatcagactaagtattatataacaacgtgatccagacagtgagttctaagtgtattaattaaatagcaaaaaattttgtttttaaaaaatgaaagagggagggttgccaacctgaagtcttaagtagattgtttgggtagcatatttccttctttgaacattgtctgaaattttctataaatcaagacttcttgtacaaagaatgatgggacatatgtaataattcaggcaatcacctgagtaatttaggcagtccaaattctttaccctgaaatacccacattttaaaaaaattgcagataattgcttcagttatttactttggggacagagatatagtgtaaagtgggagaaactgagtccttttttggtggtggtaataataagatgttataaaaatataacattttaaaaaagaaaggtccagaccttaagcgcagagctagaacaatattttttaaataatggggggaaaagggggcactttggtaattttagaaatcaggtagtatacnnnnnnnnnnnnnnnnnnnnnnnnnnnnnnnnnnnnnnnnnnnnnnnnnnnnnnnnnnnnnnnnnnnnnnnnnnnnnnnnnnnnnnnnnnnnnnnnnnnnnnnnnnnnnnnnnnnnnnnnnnnnnnnnnnnnggtagacgtggtcttaaaaacagtgtttacatggccatcttgatgcttagaaagataattgattaaaatttaataaggcagggccaactccgagagttcattgacaacggcagcaaaaaggccctgaattctgtactttcttcccccagcctccttctccagcaaggagaatagcactcctccctccagaagccagctccctaagttggagccactatgtaagagaagaggaacgttcactttttaaaattcatatatttaaaaatcaagaccaaaaagtaaattctgtactcctattattgactgtagtcaatcaaacataaaaaggtgaaagtaaaatttaattttttacccttattttactgaccaatatggaagttcttggtatctttaaggctgaccttcctggtattgtgtaatgattgaatgtatctaaactgtaataatttgaaactgacaaacataaccttctcagacttacaaaactatgttctttctaaagatacagatttttattattttattttgactaggaaggatttataaataaatgtaatgaaaaatctttgatcttaataaagtaccttcaaacagtgtgtgtacttacttgaaaattgtttttgcacttggatattctattttattatactactattgtgatctattccattatactatttcccatggtagaacaaattatattttctactgtgatatgaagtgatgtaattgaacttgccatgtctaaaattaaatttcatatttttttc

SEQ ID NO: 1899 - protein, 576 aa, Homo sapien
MPALSTGSGSDTGLYELLAALPAQLQPHVDSQEDLTFLWDMFGEKSLHSLVKIHEKLHYYEKQSPVPILHGAAALADDLAEELQNKPLNSEIRELLKLLSKPNVKALLSVHDTVAQKNYDPVLPPMPEDIDDEEDSVKIIRLVKNREPLGATIKKDEQTGAIIVARIMRGGAADRSGLIHVGDELREVNGIPVEDKRPEEIIQILAQSQGAITFKIIPGSKEETPSKEGKMFIKALFDYNPNEDKAIPCKEAGLSFKKGDILQIMSQDDATWWQAKHEADANPRAGLIPSKHFQERRLALRRPEILVQPLKVSNRKSSGFRKSFRLSRKDKKTNKSMYECKKSDQYDTADVPTYEEVTPYRRQTNEKYRLVVLVGPVGVGLNELKRKLLISDTQHYGVTVPHTTRARRSQESDGVEYIFISKHLFETDVQNNKFIEYGEYKNNYYGTSIDSVRSVLAKNKVCLLDVQPHTVKHLRTLEFKPYVIFIKPPSIERLRETRKNAKIISSRDDQGAAKPFTEEDFQEMIKSAQIMESQYGHLFDKIIINDDLTVAFNELKTTFDKLETETHWVPVSWLHS

SEQ ID NO: 1900 - DNA, 1044 bp, Homo sapien
gtcttggttattcttggttctttattattcaatataaattttagaagctgaatttgaaaagatttggattggaatttcattaaatctacaggtcaatttagggagagttgataattttacagaattgagtcatctggtgttccaataagaataagagaacaattattggctgtacaattcttgccaaatagtaggcaaagcaaagcttaggaagtatactggtgccatttcaggaacaaagctaggtgcgaatatttttgtctttctgaatcatgatgctgtaagttctaaagtgatttctcctcttggctttggacacatggtgtttaattacctactgctgactatccacaaacagaaagagactggtcatgccccacagggttggggtatccaagataatggagcgaggctctcatgtgtcctaggttacacaccgaaaatccacagtttattctgtgaagaaaggaggctatgtttatgatacagactgtgatatttttatcatagcctattctggtatcatgtgcaaaagctataaatgaaaaacacaggaacttggcatgtgagtcattgctccccctaaatgacaattaataaggaaggaacattgagacagaataaaatgatccccttctgggtttaatttagaaagttccataattaggtttaatagaaataaatgtaaatttctatgattaaaaataaattagcacatttagggatacacaaattataaatcattttctaaatgctaaaaacaagctcaggtttttttcagaagaaagttttaattttttttctttagtggaagatatcactctgacggaaagttttgatgtgaggggcggatgactataaagtgggcatcttcccccacaggaagatgtttccatctgtgggtgagaggtgcccaccgcagctagggcaggttacatgtgccctgtgtgtggtaggacttggagagtgatctttatcaacgtttttatttaaaagactatctaataaaacacaaaactatgatgttcacaggaaaaaaagaat

SEQ ID NO: 1901 - protein, 7 aa, Homo sapien
MFTGKKE

SEQ ID NO: 1902 - DNA, 2711 bp, Homo sapien
  Unsure 1074: Unknown base
  Unsure 1078: Unknown base
  Unsure 1084: Unknown base
  Unsure 1091-1092: Unknown base
  Unsure 1171: Unknown base
  Unsure 2062-2257: Unknown base
tacgaaccctgagggcctacttggctaggtgctcacggtctggtagaggagacaaagatacaaaaacagagtcacagtgtgtaatgagtgccatgggagcataaaaacagcatgcgcagggcttgtgacactcaaccgccaccccgcgcagcttccaatggaggcaaagtcacaattgaccccaatagacaggcttgacagagttagttggatgggaggcaggtggggcagcctgtccagaggcgcagacctgtgtgtgtggggaaggggtgatgggagatgcagactcggcagtgcttgttaacagaggtgtgaatgccgcgccttgcttgcctgaagatttccacccaggatcctgacaaaagtcagatgtgcacttcagaaaggccaggcgggctgcagtgaagagaatgactcgagggggtgcgggtgtgggacaggccatcgaggcaaggaggccaaatggaaagctttggtcaggacacaggtggtgatggattcgggggagaaatgggggagggtgacgcaggcagagtggccaggttatcaagtggcatcattcaccacaaaatgcagccttatggctgacgagctaccttactgagcatattcctgcctctacaccagagactcactctgtggtccggtgtcacctcgattctaaattccctgcttcctggtgaatgatgctatcacactttagaaacctggccaataaatgctttgaaatttaaggatagctatcctgaaaaaatttaatataacctaaattgatagtctaatgacatcagtattcagaagaggcattctatttcagcaagtggttttcagaaaaaaaaaaaaataagtaacctgagtttttctcctgccactctcccctcttgcttttatgctgcaaaaagagcttgtggcttgcctgacacaccgtgttgttctctgccttcgaagatctagctccctcagcctccccacgttgtccacctctccaataccattgctccactgggaagctggcccggaggtgctctaccacgttcatctctcgcagcccagggctgtctttaacgttacagngacncagatntcaaagnnttgcaatttatttggctttcattaatttgccggaagcaagggagggtagatacaaagtactcctctaccctgttatttnccttggctgttaaaatgtaaagaagactgatgtaagaatctctgccttccaccagtcataaccatggtatgcacagagcttatgaatcatcttctaaattcacagctagttttaaaatttagcttccaggctagatctgcaggaaatgattgggagatcgtaagtgctatggagtgaatatgaagttacttaccagatcccataaagttagctcagggaatcctgaggaaggtgtcactcagaaagctgctttcaaagctgagtcagacctgcatggtgtttattacctccattgtgttaccatgccaaacatataaatagcttcaaagtgagttcagattaaaacacagaaaaatctttggatatattcacaggccagtgggggtcatgtaacaagtcagcaaggaaaataaaagatatttgaggtacagcctcaactttttaagatggatcttgaataaaaaggtctaatgaaatattttatggtattgctctctgggatttaaaaaaacaaagccaaaccaaaaacgaggcactggaacaatgtttagatagatcacgggtgttttccagtatgcattttttagtgcacttacttaactgagaccctctcatatgaaactggaatgtcaccaccatgtgataaagcgtagactagctgtgacctaatacgtactgatcatgactaacgcagaagtccaggtcactgcggttgtatttcctgtggcctcaatgttctggggttagggttaacagggataattcatttctgtgttcaagtctctaattcttccatcatgtaaactgtaagtgggagcagactggattcagcattgctacaagagaaaaacaacaaataggaacaccaccaacaccatgtgttgggagccnnnnnnnnnnnnnnnnnnnnnnnnnnnnnnnnnnnnnnnnnnnnnnnnnnnnnnnnnnnnnnnnnnnnnnnnnnnnnnnnnnnnnnnnnnnnnnnnnnnnnnnnnnnnnnnnnnnnnnnnnnnnnnnnnnnnnnnnnnnnnnnnnnnnnnnnnnnnnnnnnnnnnnnnnnnnnnnnnnnnnnnnnnnnnnnnnnnnacttttcataaataaatgactcgtgttggaggtgtttgtatccttggggccactcagttttattcagccagctttccttggttgtggttttaatgtgttagggaagaatgaatgtattccccacagctgggcatctttgtgctggatcacctggccacagctcatgaatagtgcagattatcacaccccacccccatgactccagcaaatgtgctgtgggtataggagagtatattcaaaaaaggcaattaacaaagcaactgtcccaactaccaagaaaaacaaatgtggcataacccatgatagaaccctcttttttccttattagacatgaacagaagctcattaatgccgtccagtaagttcaagccgcataacttacatacactgtcaggacccagaaagaaacctgttgtcttgtgatgttattgttgcttggttgacctcatcatgt

SEQ ID NO: 1903 - protein, 33 aa, Homo sapien [sequence omitted]

SEQ ID NO: 1904 - DNA, 1253 bp, Homo sapien
  Unsure 285: Unknown base
  Unsure 290: Unknown base
  Unsure 296: Unknown base
gctggctttggcttttttatgtagaaaaggaacctattgaaaagatactgattggttccaataactgctagaagtttctgcaaaaccatgctttgaaagtgagcaggaaaagaagagactaggctgtggctgggagcacagccaaaattacaaaaccagcccagggatgatgatcctgttcatgcacagccactgtccccagcactaggcacagactctaccactgcctcactgtctctgctggacttggaaacttgatattactgttactgctgcactgtctgncatgnaaatgngttgtccagggtcccttcttcatcctttcatctctagcttataattcaaagtctgggattgagtggccaatcctaggtcacatgtccatgtcctatctccaaggggggctgggaattgaatatctggcattttccactttcacttcttatgaattaaggaattctacaaataatagaagtgggattcaggtggtaggcagacaaaaaagcctcacaattatccactacgccacccttgtataaccttaccctcattcactgtctactctcaaaactgtggagctactaatgaagatttgtaaaccctgggcttatgagcacccattcctttactacaactcagattgctctagaagctcagttcccagcacttggatttttccagtagctgaattctacctgaaggaagggcagaaacaaagggtgaagaagaggctatcacttccaagtatcctgcacccctgggctcaagacctcactggggagggagtcttttgggccacccaccaaacagcactggcattatgcctctcaccctagaccatggttacacgtggtaaaacaaccccttctggtgatacattcacaactctctagtttcccccaaatggcactatggggagcgggagcttgccttttcctcagacttaaaacaataagttttccccgtgtttcccctctaatgctgttttcttttgaccaagcatgtctgaattctagagaagtcaggaggaacacacccattctcggtttgaagggactgatgttctgaagtacaactgggcacagtcccaggctcttcaggacgcttcctccattcacacagcggggatgtgattgttacagcgggtggtgtgtgctggctgagaagccactgtgaattgattcttcttctgaagtttatgtttctactttttggaaatgaataaattacagccagtccatcaaggaaattgc

SEQ ID NO: 1905 - protein, 83 aa, Homo sapien [sequence omitted]

SEQ ID NO: 1906 - DNA, 4403 bp, Homo sapien
cagatccatgttcactagcggccttacagaaagtactcaaaaagaagttcgaatagttggtgttgaagctgaatcgatggatttagtgttgaactatgcctacacttccagagttattcttacagaggccaatgttcaagccttgttcactgcagctagcatcttccagattccttccatccaagaccaatgtgctaagtatatgatcagtcatttggacccacagaattctattggggtctttatctttgctgatcattatggtcatcaggaactcggagatcgatcaaaagaatacattcgtaaaaagtttctgtgtgtcaccaaagaacaagagtttctccagttgacaaaagaccaactgataagtatactagacagtgacgatttaaatgtagaccgagaagagcatgtttatgaaagcattataaggtggtttgagcatgaacagaatgaaagagaagtgcaccttccagaaatttttgctaaatgcatacgttttcctctgatggaagatacctttatagagaaaattccacctcagtttgcacaggctatagccaaaagctgtgtagaaaagggaccatccaacaccaatggctgtacacagaggcttggaatgactgcttctgaaatgatcatatgttttgatgctgcccacaaacactcaggaaagaagcaaacagtgccttgtctagatatagtcacaggaagggtgtttaaactatgcaaaccaccaaatgacctgagagaagttgggattcttgtatcaccagataatgacatttacattgcaggagggtacaggccaagcagcagtgaggtctccatcgaccataaggcagaaaatgatttctggatgtatgatcattccaccaatagatggctatccaaaccatccttgcttcgagccagaataggctgcaaacttgtctattgctgtggtaaaatgtatgcaatcggaggtcgtgtttatgaaggtgatgggagaaactcactaaaatctgttgagtgctacgacagtagagagaattgttggacgactgtttgcgcgatgccagttgcaatggaatttcataatgctgtggagtacaaagagaagatctatgttttacagggagaattttttctcttctatgagcctcaaaaagactactggggtttcttaacccccatgactgtgcctagaatccagggcttagcagctgtatacaaggactctatctactacatagctggaacctgtggaaatcatcaacgtatgtttactgtagaagcctatgatattgagctaaataaatggactcgtaagaaagactttccatgtgatcagtccataaatccataccttaaactggtacttttccagaacaaactccatttatttgttcgagctactcaagtgactgttgaagaacacgtcttcagaaccagcagaaaaaattccctttaccaatatgatgacattgctgaccagtggatgaaagtgtatgagaccccagatcggctctgggaccttggccggcattttgaatgtgctgttgctaaactgtatcctcagtgtcttcagaaagtactctaaatgagtagcaggccttagtgcatcactggcatctcattcttaggaaacttgtctttgatacaaaagagtgctgacagtatttcagaaagctgagagagttttatacatggaaaatgggtatgcttaaagattgcagggtagggagggattttccttcatccttgtgacatttcatttcagtaaggaaaagataacaaagtgcaattatcagcatttttttttcctggcataaaattaatcatttcattttataattttgtgataaatagtaactgaggtaccagatgaatcaggacaactatgcactcttataagagcatttagggtattattgggtaaagacgtctaaacttgtttgatgtgacttttaattttaaatacgggtaacaatctgaggcaatatcactaggactttagctgtgacctctctaacacagagaagcactaacttagatcctcattcttaatatttatatgtatctatttttgtgtactgttttcaagtgtactgagatttaaatgtgttctattattagagtagatcgaagaaaaaattagtctcagaaagagcttttagtctgattgtttccatttcccatgtaattttaagttaagctaaagttttaaagtggcagttttctgtcgatgactttttcaagtgctaacactgtctcttttgtgaaaatctggaaaagtgctcatattcacaggtggctggtgctagtctaacttaattcatgtgtataactagatggatttaaatggtctgagcctatgcctatctttcaaattggtgtggatttcatggccatagtactttacctgttgaactcttgtgatttcacaagattctctacttatgtgataggagggtatggccagttattcatctaactggactcaatcttagaatagtaggaacattatacccagtttgcactaacatgggccatttgtagcccaaccttctcttccatctacctgtccattcattattggtacaaggaaaggtaacttatttctcttctgcacagagcataatgtgaagttttatacctacttttaaaattctgctttccagaaacaaaattcctgcagtggtctaatttaatgtctttaagtttcatattacaattaaaacctcattttttttttccatttttgcacttaacagtgatgaatacttttacgttggaatcctccttctagctgaaggtgattgaaaaggaaaagagtgagtgaacagaaccatagctttctaggtactaaagcattttttgcatttaactgatgaaatttctaacaatcatcagttaggaatattaacatgaaggataaaccaacttatttgtatacctaaggcaggcatttggatcagtaacatgttttactaagcctagagtaattcgtaaagggtataagcataggacagattttgccctcaatcacaatatttgtattcacttgaaagcaaactggcatggttcgtattttaaaaatcttgcacaaattgtaatgtgatactgtgaaacaaattgaaaacattgcctctttgcatcacatacctcgtttttcagaaactttccaaactgctttacatagacctctacaagtagggaatgttttctgaagcagaagttaaaatggacagcatttctagaattaacattttaaaatctagtcttagctagatatgtggtttcttcttattggtgttgatagtatgtctgtaatctctgtataaactttgtcaacatttttacctccccagttttatcttctgttttgtttttgtttttatcatcatgatgttttggagttattactgtgtattttagaaatcattctttacagttttgcattgctgaggagagagaaaaaacaatttttttgcaagagatgttcatgtaatttatttttgaaagctttgttgaataagatttcctgccgctttttgacaatcttgtgtatttagaaaaatgtattacttgaaaacatgacatagaacattgagttagcaatttacatgggctgtatgttatataagagaatgacatactgtggctaattcaacagtagatttattcttttagcctgcacaacagttgatcttttggctatgacaatttgtatggagggtacgatctaagttaagtgtgtcaaaagcaaggcttaggatttgttatgggagtagaatatatattgaattttgtatgaagaactatttgtttaaattatatagctgggatattttcccactgttaaaatggattcagaagaggtcctagaaaagtaagattagtgacatgtgtgggtttatatttagatatttaaggtgcattttcatagtgtggtaagaccttaagtaaaaggcacaatgggtactacagaattaaaatgtaggtctaacataatgccagttccactttaactttgtttttgcatttgaagaatgtatgtagcactttcctatatatttgtcacacattgaaaactggactgggtataactatgttataggaaagtagaaattgtattctttattttccatctttgttttctgttctacaaagttgatgcttaagcatcaagctgattttattggtcatgagaacaaatggatgtgatcatgaaggaatcagattccctatgtaaagcagtttaaaatggaattcaatgttcagtgctcaggtatgtagtaagtactgtagtcctgtgggggcaaatgtgtagatatttttaaacattttgccataattgcacaattttttgcatttttacctgatgtcattgtttcttataataaaaccttttctgattg

SEQ ID NO: 1907 - DNA, 2524 bp, Homo sapien
ccggggcggcggttgcatcagattctaggaagtgtctgtagccgcagctgcgggtccgggattcccagccatggcagattcctccgggcagcagggcaaaggccggcgtgtgcagccccagtggtcccctcctgctgggacccagccatgcagactccacctttacaacagcctcaccaggaacaaggaagtgttcatacctcaagatgggaaaaaggtgacgtggtattgctgtgggccaaccgtctatgacgcatctcacatggggcacgccaggtcctacatctcttttgatatcttgagaagagtgttgaaggattacttcaaatttgatgtcttttattgcatgaacattacggatattgatgacaagatcatcaagagggcccggcagaaccacctgttcgagcagtatcgggagaagaggcctgaagcggcacagctcttggaggatgttcaggccgccctgaagccattttcagtaaaattaaatgagaccacggatcccgataaaaagcagatgctcgaacggattcagcacgcagtgcagcttgccacagagccacttgagaaagctgtgcagtccagactcacgggagaggaagtcaacagctgtgtggaggtgttgctggaagaagccaaggatttgctctctgactggctggattctacacttggctgtgatgtcactgacaattccatcttctccaagctgcccaagttctgggagggggacttccacagagacatggaagctctgaatgttctccctccagatgtcttaacccgggttagtgagtatgtgccagaaattgtgaactttgtccagaagattgtggacaacggttacggctatgtctccaatgggtctgtctactttgatacagcgaagtttgcttctagcgagaagcactcctatgggaagctggtgcctgaggccgttggagatcagaaagcccttcaagaaggggaaggtgacctgagcatctctgcagaccgcctgagtgagaagcgctctcccaacgactttgccttatggaaggcctctaagcccggagaaccgtcctggccgtgcccttggggaaagggtcgtccgggctggcatatcgagtgctcggccatggcaggcaccctcctaggggcttcgatggacattcacggaggtgggttcgacctccggttcccccaccatgacaatgagctggcacagtcggaggcctactttgaaaacgactgctgggtcaggtacttcctgcacacaggccacctgaccattgcaggctgcaaaatgtcaaagtcactaaaaaacttcatcaccattaaagatgccttgaaaaagcactcagcacggcagttgcggctggccttcctcatgcactcgtggaaggacaccctggactactccagcaacaccatggagtcagcgcttcaatatgagaagttcttgaatgagtttttcttaaatgtgaaagatatccttcgcgctcctgttgacatcactggtcagtttgagaagtggggagaagaagaagcagaactgaataagaacttttatgacaagaagacagcaattcacaaagccctctgtgacaatgttgacacccgcaccgtcatggaagagatgcgggccttggtcagtcagtgcaacctctatatggcagcccggaaagccgtgaggaagaggcccaaccaggctctgctggagaacatcgccctgtacctcacccatatgctgaagatctttggggccgtagaagaggacagctccctgggattcccggtcggagggcctggaaccagcctcagtctcgaggccacagtcatgccctaccttcaggtgttatcagaattccgagaaggagtgcggaagattgcccgagagcaaaaagtccctgagattctgcagctcagcgatgccctgcgggacaacatcctgcctgagcttggggtgcggtttgaagaccacgaaggactgcccacagtggtgaaactggtagacagaaacaccttattaaaagagagagaagaaaagagacgggttgaagaggagaagaggaagaagaaagaggaggcggcccggaggaaacaggaacaagaagcagcaaagctggccaagatgaagattccccccagtgagatgttcttgtcagaaaccgacaaatactccaagtttgatgaaaatggtctgcccacacatgacatggagggcaaagagctcagcaaagggcaagccaagaagctgaagaagctcttcgaggctcaggagaagctctacaaggaatatctgcagatggcccagaatggaagcttccagtgagggggcacaggactgactttttaaaccattgtggactagtggctgctgtctgcctcagtgacaatgtcccagcgctcctatcatgtttacagtcacccttgggtcctaaattaagagttgtgttcatgtaggttcgtgtcgtcgttggctctgagacattgataataaatttttctcaacagtgaaaaaaaaaaaaaaaaaaaaaaa

SEQ ID NO: 1908 - protein, 748 aa, Homo sapien
MADSSGQQGKGRRVQPQWSPPAGTQPCRLHLYNSLTRNKEVFIPQDGKKVTWYCCGPTVYDASHMGHARSYISFDILRRVLKDYFKFDVFYCMNITDIDDKIIKRARQNHLFEQYREKRPEAAQLLEDVQAALKPFSVKLNETTDPDKKQMLERIQHAVQLATEPLEKAVQSRLTGEEVNSCVEVLLEEAKDLLSDWLDSTLGCDVTDNSIFSKLPKFWEGDFHRDMEALNVLPPDVLTRVSEYVPEIVNFVQKIVDNGYGYVSNGSVYFDTAKFASSEKHSYGKLVPEAVGDQKALQEGEGDLSISADRLSEKRSPNDFALWKASKPGEPSWPCPWGKGRPGWHIECSAMAGTLLGASMDIHGGGFDLRFPHHDNELAQSEAYFENDCWVRYFLHTGHLTIAGCKMSKSLKNFITIKDALKKHSARQLRLAFLMHSWKDTLDYSSNTMESALQYEKFLNEFFLNVKDILRAPVDITGQFEKWGEEEAELNKNFYDKKTAIHKALCDNVDTRTVMEEMRALVSQCNLYMAARKAVRKRPNQALLENIALYLTHMLKIFGAVEEDSSLGFPVGGPGTSLSLEATVMPYLQVLSEFREGVRKIAREQKVPEILQLSDALRDNILPELGVRFEDHEGLPTVVKLVDRNTLLKEREEKRRVEEEKRKKKEEAARRKQEQEAAKLAKMKIPPSEMFLSETDKYSKFDENGLPTHDMEGKELSKGQAKKLKKLFEAQEKLYKEYLQMAQNGSFQ

SEQ ID NO: 1909 - DNA, 2310 bp, Homo sapien
  Unsure 1077-1114: Unknown base
caaatccagtctctagcagttatgttgttagaatggattcatctgtgcttatttcacaatacttcatttatagcaatgcttttccttaagctaatgtataaatatttctaaaggccattaatagtaacaaaataagtaggggaaaaaatggaccttctgtataaaaaccccttagcttttttttttcacaagttataagtggaataagttaataactgagctcgtaagtgtatctcataactataagagctacatgaagaaaataggaataacacacctggtatttaaacacaatcttcaaaattcttgcaacattaaacatagtaaaatgccagaatataaaatgaggtgtgctaatggtcacaggattgaggccagcattacagtttggggtgatttttcttttatttgctccctcactttgtttcctagatgctagtaggggtatctgggttgcttgagataccattttgcaattgccccttctctttctgcctaccatcttctcaggccctgatgagcttattggtaggcaactgggctgctttaatgttgaacttgtacttctttagaaactgaagtggaatcattgaaaactttcaataaagctttaaagttccatttacttttgaagcacagctaagctcctctgaaggcagctggtttgttgcaaacttaaaattgtactgaaaagttgccactttttatttagtaagaaaacaaacattctggctcactagagttcagaaaagtaataatttgagccaaaggaatttgaattaagaaaatagaaactaggtttcatgtatttaaaaaataggaaataaaatagaaactcaaatgccatgaagttatcttcctcttccttatatcccctaagtttggggatataaggaagaggaagataactttccaattcctaataacctaaattattttgaaatagtgttttcagtgaaatgatgaatgtttgaatgtttgtttggtaatcaacataacaatgctaacaaaattcccacttagattttttaacttttaaaagtcagcgtggttttgataatttgatattttaaatgnnnnnnnnnnnnnnnnnnnnnnnnnnnnnnnnnnnnnntgttaataaactgataggatggagtgagcaaaattgttttcagggaagatggcacattttagaaaagacttgcccagatgatcttccatattgctcccccaatgtcatttatcgctcatgccaatcctcctcttgttacctgtggctatggtaaaattcctttaacaagcttcattgtgtccaagtatttcagagacttttaaaagctgggcatgacatagcgttttgtgctgttaagaccttagcagagtcaggtagtttacgggtaatattcaaccttgtgcatctgaatctgtcatggattcccttcactcagcactttgccactaatttgtattacactctgtggccatataatacttgcacattatgcaaaaaaaaatgttgatagtatctccttgccacacaatatgcagagttgacaacctttgaaaaccaaggtaactaatatgtatgtcctagttgtgtggcgcttggtaacaaagtctgtacatattatgtataaaatgtgtattggttagcatttagtactaagaaattctgagtttaaaataagtgatttttttcaaagtagcgatatctatatctgtgtttatctaaaaatactggcttgaatagaaaacattctcagatgattcaagattgagtaaaaatgagaatcccatacattccattattaaattctgccctattcccaattgttagcatctggctgatattaaggtctttgattgtcacaatattctcaataaatgagacattctgaactgcctggtgatattttcaaaaagagcaattaaaatgtgtattccctctaatacagctgatagaactgttgtgttaaagcaagttggaaatttgcatgatagtgtggaaaccaatggaggtccaaaatattaatcatatctaaaatatcagaaaatatcaatactagtcttctttatgcatatttttgactttttaagagggcttatgaattcaatgtttcttctgaggcaatccttttaatgtaaatactaaatacttgcatgtcttttgacaaaggctaaactacaatctattaatatgcacatttttgataaaatataaagtaccctaattaaagaaattgtggtagaaggtgtatgtcctgaatactatacctgtttaacaataccaaatgttaaataaaaatagtttgaaattaatgtttaaaa

SEQ ID NO: 1910 - protein, 36 aa, Homo sapien
QIQSLAVMLLEWIHLCLFHNTSFIAMLFLKLMYKYF

SEQ ID NO: 1911 - DNA, 2446 bp, Homo sapien
ctaaaagctgctgtacaagcctttaaagaagcaagacaaaatgttgctgaagttgagtcatcaaagaatgcttcagaggacaatcattctgagaatactttgtattcaaatgataatggaagtaatttacagcgtgaagcaactgtcatcagtgagcaaaaagtcaaagaaaccaaaatattggcgaagaaaccaatacataattcaaaggaaaaaatagcaaagatggaacatggacctaaagcagtgactattgcaaattctccatcaaagccttcagaaaaggattctgtagtttcccttgagtcccagaagacacctgctgacccaaaactgaaaactctaagtcaaaccaaaaaaaacaaaggatctgatagctcactctctggtaacagtgatggcggagaagaattttgtgaagaggagaaggaatattttgatgatagcacagaagaaaggttttacaagcagtcttccatgtctgaagatagtgatagcggtgacgacttcttcattgggaaagtcagacggacacgaaagaaggaaagtagttgtcattcttcagttaaggaacaaaaaccactagaaaaagtgtttcttaaagaagatacaggtgaaactcatggggatacaagaaatgacaaaatcaagccaagtacagaaaccagaaagttagaatcagtgtttttccactctttatctggatctaaaagctctagaagaaatttcaaagaacaggctccaaaaacaagatccctagattttccacagaatgagcctcagatcaagaatcagtttaataagaagctatcaggaagacttgaaaatacaaaacagcaattgcagctgcctcttcatccttcatgggaagcaagcagaaggcgaaaagaacagcaatctaatattgctgtgtttcaggggaaaaaaattacgtttgatgattgattagtgcctctttctgcaaacttttccatctaaaaaaaaaaatgttttttttgggacaggatctcattctgttgcccagactagagtacaatattgcaatcacagctcactgcagcctcaaactcctgggctcaagtgatcctcccacctctgcctcccaaagggctgggactgcaggtgcatgcactaccatgcccagctttctcaccccaggctctgcagctattacttaaactcgtatttgaataagtctcttggggagaattatagaatgtttgtttttgtatttttttttaaagtaaattcaacttacgcttatataagcctttcacaaatccaatatgtacttaaattgatttttaataatatccctcagactgtttcccttatgaagtaatttggggattttagtgatctcatattttctctttagtgcttatcatgaaatgtgcttcactggttcagctctgttgtttccttaaacataaatgtcaatatatatttaaaataataatggaaacataggaaatcagctatttaaaccagatcacccttgttaaaaatcattcttgttagcaaactaaaatagtaacttttattatggatgtacagataaatattaattttattatagttttaagtacttgtgatcatgtactttttgattctaaaatagttgtctaggacaattttgggattcttaattatattttagttaagaaaattgtttaaatatagcaatacaaccaataatttgttttatgtttcactgcatataaatatttccattaaatcaagaatgtatattatctagtttttactatacttattttaaaatttttgaggaatcatagattctaatttttaagaacaaattctgaaggtggtaggattaaaagaatatttccactgatggctaagcaaagaagttgtaagatgactcactgaggaagggactgctttatacatcacagtactgctatttaaaaggaaaacagaaatttttaaatcccttcaaatgtttcacttttgctatgctgggaaaaattttgaagttcttggtaaactgaataatgctaatccatgtttcctgcacattagttcctttaatggcagggaaggccatctggttaacctgtattcacaaactctcaagagtttctacttatttcaggagcttaagaatttagataactcagccgggcgtggtgactcatgcctataatcccagcactttgggaggctgaggcgggtagatcgctagaggcaaggagttcaaaaccagcctgggcaacatggtgaaaccctgtctctactaaaaatacagaaaattatccaggcgtggtggccggcatctgtaattccagctactcagaaggctgaggcataagaattgcttgaacctgggaggtggaggttgcagtgagccaagattgcaccactgcactccagcctgggtgacagagtatgactgtctcaaaaaaaaaaaaaaaaaaaaaaa

SEQ ID NO: 1912 - DNA, 1517 bp, Homo sapien
ctgcgcctggcgtcaccgaccggtgcggacaggaagaggctctgggctggcacatgtgtatggcggtgaggcgggcgggtacatggcgggctctgtgggactggcgttgtgcgggcagacgttggtggtgcggggcggcagccgattcctggccacctccatagcaagcagtgatgatgacagcctcttcatctatgactgcagtgctgcagaaaagaagtcacaagaaaataaaggggaggacgcgcccttggaccaggggagcggtgcgattctggcgtccaccttctccaagtctggcagctattttgctttaaccgatgacagtaagcgtctgattcttttccgtacaaaaccatggcaatgtctgagtgtcaggaccgtggcaaggaggtgtacagccctgactttcatagcctcggaggagaaggtcttggtggccgacaagtctggagacgtctactccttttcggtgctggagccacacgggtgtggccgtctagagctggggcacctgtctatgctgttagatgtggctgtgagtcctgatgaccgcttcatcctcactgccgaccgggacgagaagatccgagtcagctgggccgcggcgccccatagcatcgagtccttctgcttggggcacacagagtttgtgagccgtatctccgtggtgccaactcagcccgggctgcttctgtcctcctctggggacggcaccctgaggctctgggagtacaggagcggccgccagctgcactgctgtcacctggccagtctgcaggagctggtggacccccaggccccccagaagtttgccgcgtccaggattgcattctggtgccaggagaactgcgtggcgctcctgtgcgacggcactcctgtggtctacatcttccagctggacgcccgcagacagcagttggtgtacaggcagcagctggcgttccagcaccaagtgtgggacgtggctttcgaggagacccaggggctgtgggtgctccaggactgccaggaagcccccctggtgctctacaggcctgtgggcgaccagtggcagtctgttcctgagagcaccgtgttaaagaaagtctctggtgttcttcgtgggaactgggccatgctggaaggctctgccggcgcagacgccagcttcagcagtctctacaaggccacgttcgacaacgtgacctcctacctgaagaagaaagaggagagactgcagcagcagctagagaagaagcagcggcgccggagtcccccgcctgggcccgacgggcatgccaagaagatgagaccgggggaggcgacgctaagttgctgatcgtggcggtctgtttctgtcgactgtggaccacttatgtgcgatccgtggaccacttgcgtgcgatctgtcggccgacgatgagcttgttcggatgtagctccatcgtaagtcgaggagcatctgtgatttgtcctctgcttatgggatatgtttttccgctactgagtctgtgtagtaaatttttgactaggaa

SEQ ID NO: 1913 - protein, 412 aa, Homo sapien
MAGSVGLALCGQTLVVRGGSRFLATSIASSDDDSLFIYDCSAAEKKSQENKGEDAPLDQGSGAILASTFSKSGSYFALTDDSKRLILFRTKPWQCLSVRTVARRCTALTFIASEEKVLVADKSGDVYSFSVLEPHGCGRLELGHLSMLLDVAVSPDDRFILTADRDEKIRVSWAAAPHSIESFCLGHTEFVSRISVVPTQPGLLLSSSGDGTLRLWEYRSGRQLHCCHLASLQELVDPQAPQKFAASRIAFWCQENCVALLCDGTPVVYIFQLDARRQQLVYRQQLAFQHQVWDVAFEETQGLWVLQDCQEAPLVLYRPVGDQWQSVPESTVLKKVSGVLRGNWAMLEGSAGADASFSSLYKATFDNVTSYLKKKEERLQQQLEKKQRRRSPPPGPDGHAKKMRPGEATLSC

SEQ ID NO: 1914 - DNA, 1442 bp, Homo sapien
  Unsure 21: Unknown base
  Unsure 925-946: Unknown base
tgcctggcctgacatttttanaaaaagttttattttgcacggctctaaacctccatgttattttccagtggtgtagaaggtaccagctaaagtgaaccactatgtaatattaggccattctaaaggaaagatgttccatgtcatcagagatggtaaaataggcagggaaaaaaaaatctttggtaccaaagattacacttgtgtttctacacagcaaaccatttttctttcatgaaaataatatattattaacatgaatatattattttgctattaatgtgaaagttgtctctaaatattttttaattttcaaactcatactttattttcatttgaaatgtttttcacaccttttgcattacataataattttgtggaagcattttgccctttagaataaatattagattgatatagctgaaatgtgacttccagttctttgatattccccttgttattcaaatagaaatatggaaatgctttatatattactgttaaatttcttagtgcagaaataacattattaatagagtattgttttcaaaacagatgattaatttcaagaggtttaacagtgaaattgtgtcaatattttgcatttaaaatgaatttaattgaccgatattttctgtagttaaatttagtcacaatatcacatatgttcttcaagaaacacatgaaattattaataaagtaattaaaaaatttttaatgtataacagaattgaccaataggccagttttctggtaacttatgatagtagattgtttctttagaaactgggcagaagctctgcattctcacttgtactttgatttcttatttcttggtcaggcaatttgaggaaagaagaaatggcatggggaatatatatgttttgtttcttagggaaaacagtctgagaaatgaataaaaagcatgaannnnnnnnnnnnnnnnnnnnnntaccatggaaaaggatattcacagtagtacagttctcaatatttttaattagatgtcatatttttttaatatagtaaaaccttgggatatagaatattacatcttttgagaatgtatgtgtctctaagtaagtaaaatctaatgcgtataggagactgatagctaaaaatgaatggaacattaatgtacttttataattaaacctcttatctatcagaaattgtaagagaatagatacatgttttgaatgtaaagttgaaaagtctggtttactgaataaattgaaagtgatttataaaatctaaatttggactacttgcaaatgataagctattctagtagcctttagtttaaatccaacagaaatctagaagtcacaagcaaatatcttaaaggtaaaatccatctgggcactcatttaaagtatatcttaaaaaagcagcagcaaggtaccttgccatttttagcatattttcttcctttttcttttttcttt

SEQ ID NO: 1915 - protein, 30 aa, Homo sapien
  unsure 7: unknown amino acid
PGLTFLXKVLFCTALNLHVIFQWCRRYQLK

SEQ ID NO: 1916 - DNA, 3804 bp, Homo sapien
  Unsure 607-674: Unknown base
  Unsure 2124-2188: Unknown base
acgaatttagaatataggtagtgttcttggaatacttttagaatatgttggaataaagtcatcctttctcattttctgaaaaagcagggaagaagcaacagtttggttttgatgagtttggaattttctgccacttgtagtgataaatgttcttagcagaagcacgtggcagcattaaacttaaaaattaatatcagtacgtatgttaataattttaactagttttattttagaaggataaggatattctgactagattacagtaacatctacaattgcaatttctatgacagtaaatttagcttctataaaacgtaaagaacctttagtaaaacagcagggaattgagtatcatctgttgaataaataaatttatcattttatcctgccagaagtatgatgggcatcttccaatagaaataaaagctgttcctgagggctttgtcattcccagaggaaatgttctcttcacggtggaaaacacagatccagagtgttactggcttacaaattggattgaggtaaattgtttttttaattcttatttaacattaattgaataaagaccattgaactgagattacagtttagaatttgttactaatannnnnnnnnnnnnnnnnnnnnnnnnnnnnnnnnnnnnnnnnnnnnnnnnnnnnnnnnnnnnnnnnnnngactaaataatctttaaggtttcttctagtagaatagaatgttctgagattttgtttaaatcaaattattgagagtgattgtttttaaaacctagttggctttcatctaattcattgccattttaagtgtgtattattttagagcaaacttagaaaaacagcacatttctagtaacttacgacattcgatgaatgataaatgttcaagttagactaaaggaactttattccaacttctagtaactactttcttcatttttctctcatcagtttaggtcttaggatctaccatctgttacttttcagtttctcatctaaataaaacaagatctgctgttcatattgtttaatttctcaggaagggtacattttgggctttgggtttatactgcgagccttttttttgtttttcttgtatgtatacctaagtagtcatatgttttcacatggtcagagttttgataataatactctacctagcttctgaacagtttaataatagatttaatccgtgagaggaaataccctcgaaagttactatagaaataacaccttactatctggtggcatttacttagttcttagaactgactaattagtttatcggttaaagtaatttgctattatattgtaaaatagtacatttgaggctcacttataaaaattggaaaacatcgaaatataagaggtccaagagggtgtttgaaacacattttgctaagttgacaggaaattaatagactttttatgggccattaactaataatacactcaaaaaaaaggtacagttaaataaaggttttaaatagtctataccgtatactaaaactaaattaatatttaggactgaaataacatattgattaagtaccagctatgtacccaaaaaatgctgggcacagaagttagagtaagatgttttacttaaagggcctttgagtgagagttggcaattcattctgaactaaccactaatatcattaagaattagtgctgagttggtagcaggaaataggtaattctgtctaaaggaatcatgaaatggaaaataaataagcttttaataaggagaaggaagagctgaagaaatggcacagtgttcttagaatgacagatagtcctatggggactgcagcataaaagtgaaaaatgtataagataaacctttagatggtaagcaaggcaagattctcaaattctgtatgaatcagctccacctccgccccatggacagtagatgaccgttaatggcttttaaggaaagatgcaacctggaaaaaaaaagaaaaaaacttgttttagaatggtaaccactggcaatatgaagaataattagactaaagaagagaggtaggataatcatgggcattggcagtggaattgaaagagtaatttcagaagcagaatggtcagatgttggaggtgattggttatagagtttaagaattgnnnnnnnnnnnnnnnnnnnnnnnnnnnnnnnnnnnnnnnnnnnnnnnnnnnnnnnnnnnnnnnnncctgattctgtggttgactggatggtcgtctgctgctcttgcttagacttaggcatctgcatttagctgagggttcagccagggctggacatcctttaatggcctcattcccatgtctggggcctcaggtcagatagctgggactaccgggtctcactccagaagaggcttcttcagagcatggtagtcttggggttctaagagaatgagagtagaagctgcaaaacctcttgaaactggggcttgggagtcacacatgactttctccacattctgttcgtcaaaagcgaatcataaggacagcacagactcaagggataagaaaggagattccatctcttgatgagaagagctgcaaaggccatatttaatcagtcacaggagtctaatgctacaaagtagttttttaaaaagatgactagattggcaagttcaaggttaatctttttatttgttttatttatatatcacttagctggtattcagtaaaagcttgctttgtaaaatttagttaatatctttttggttcagcacagacattgcatcatcttagcagctctttttcaaacagatttgaagctgcttcaaataacaatctggtttataaaatgaaaatagaaaattatgatcttagaatgaagaagtgaatttctaagccatgataattattacggttgctgtgattagacagacttttctgtggagcttcctgacaaccaagaaaaaaggggaaatcaaggaactgttcttatcagaaagtaggaacccagcaattctttcattttctcattgggaacttaatagtcactgaattacaaagtagacagtgaccttgattatacaacatatgcggaagtgtttcctgtaacttacgtgagtattttatcaaatacttatatatttgataaaagctaagtacataaagcataactcagtagatagaattctctagtagtaagctaaagtgcttcaagtattagttgtcatattaatccaagagaaaattagatctgagactacctcgaggagtaaacgaacaacttctttaaaccaatactagtcaaaatgcagtccacggaccaatgctggttcatgccctatttgatccaagtccacattaagtacagaaatgaagagtaagcatttagaaacttggggcaatttgacattgcctcaacatccaagtttcagtgtcctttataaactattgatccatgacagatcatgaaactttctaaaaattgatccttttatcacatagtctttcaaaatattatttgcttctttgaagctttggatagaaacttgataatgtgaagttctctgctatgtggacctggtgtgcttatcttctttgttgctgatttgagagctgagctatgtactatatctggaatgcacacagcaggcatcctgctgtgcagttctgtgtctagttaatagtatggaagttcacattatcaagtttctatccaaagcttcaaagaagcaaataatattttgaaagactatgtgataaaaggatcaatttttagaaagtttcatgatctgtcatggatcaatagtttataaaggacactgaaacttggatgttgaggcaatgtcaaattgcccca

SEQ ID NO: 1917 - protein, 8 aa, Homo sapien
MLRQCQIA

SEQ ID NO: 1918 - DNA, 1187 bp, Homo sapien
aaccaaaaaatagcatctgtagcccctgtgtgcttactttaagtatatgttactgaaaaatgcggagtgagcacttacaactcattctcctgggaagcacagtgatactataccccaaatgcttttctttatcattttaatttttatcttctttacttacatttccaacatcagttaagagggtcttgtagttttctaactgaaaggagattgtaaaatctccttgctcaaaactcagatgcagaatattatttttactacaataaatacatctacaacaatggtattatatctggtttatttcaaagtcaagttctaatataggtaaacaaatatactaataaagagataatgcttttctcatgaaatgtataatctagtaggaataaagataaacaatttttttaaaaattctatttcattaagcaaaaatgcaactcagaagaataatgtatattagcagtcatttactatttttcaattaaattccgatatatatgtaaagtaaattattactaatatcaaacatagtttaaagaattagtgactatgtgcacttggatctccatatgtaatgtactatcagcatcttcacaaacacagtaaattttactacgcaagtaaaacttattttactaaacgatgattactccttctatattcatattcctaaacacatacagtttcttaatgtaattaagtttttaactaaaaaaagggaaatgcattattgaggcgataggattactgggtggctataaacacatctgctgcacagctgacatttatcttctacaatgagcaatgacaattttattttttaataatcagtatggactaatcctgatgatttttttttaacattttcaaatagggctgcatatggcttaaaattaatatatacatgtgtacctatataatattcttatttattaatggacttcctacatagctcatattgacgttagatttaaatgaaattccagaagggttttctataggtaagtcatacattggatttccatattacctatgattattgaagtatttatttctgtttttaagacttcagagcaattttgctggtcatttgttttctgtgtttttattttgaaattgttctttgaggcattgtccttatttacatttttaaggtatgttaataaaataatatttttaatgaaaaa

SEQ ID NO: 1919 - protein, 50 aa, Homo sapien [sequence omitted]

SEQ ID NO: 1920 - DNA, 4444 bp, Homo sapien
aggaatgaaaggtcataagccattagaaatagtggcattattatgcaataacaacaccctagctaacctgcttttgtcatctgtagcacttacaataaagaatgatgaccttccaaccctggacactacctcgataaagcaaaccagagatcctctctacactttctatggaagccataaaagttgccatcaatatatccactttcatagttctatacttttatactttctagacttttttatagactttatgatcagatctttttgtctcagaggataggttttgcaagattcaaaggaaaatcaaactccttggttgttccagctttgaagcttttgcttcagtaaatttgtttaaagaaccagatcacataccatttatcaaattctttacttaagtcagaatactttgcagacatacatatttggaaaacaaactgtttcttgttcactagatagaatctgtattgtagtaagaaactacttacaaggtggctttctttctgctttgttactctatgtattactcaataatatatgtatggtcacaggttcctggagttgttttatttctttatgacagacacatgagtatgcacctctctctaatcctctgatgtcactgcagcttcagtctctctcactctgtttttgagtgccttcaaaatgccagcatcctggaacattcttttcctgatctaaatcctacctctgactatttcattatccatgaatattggaattcacccatattccaatgggcttaactctacaaactagctaaaaccttggacaagaatttgaccgtatttctagttttgttcctccatgtcatttttaggttatatttttaacttttatttatatcttatttcttcacatatttcgtctctctgttgaaagattttatccttatttgactcttcactttttttactttcaccagaaatttgacgttcctttaaaattaaaggtcattgaatgtcttttgaacacctttttctcaactgaagtcttcctgaatgcctcccctttctgatgaaaggatcctgagtgctgctgttgctctgccctgttcccatgtgcccactcccttccgtacacattttgcaagactatactctttattttagtcaaattaatttaaaattgctccctgggtttctgctctctcatggccctgtccctcaaaaacttctgtttactttttctagctgttttcatctaatttgtttaaaatgtatgatggatccataatatatgaaggatgtaatgaaaaggaggttgcagtgttttatataatatgatcgagcacctccgtgatgaaacatttagcaattggctagtccttcacagccagagtggaagtttgtgctgtggacaggtctttttactcccttccagttctcctccaaaactggacgaaaaaggaaaaaaaaaaagaactctttcaaatgaggagatttgattgcatttttttaggtgaatgaaagcttggagttgagcatttgggccttagtcagcatttttcctttctgacttaaaatctcatgtccttttccttaaagttaatagtactcaggtttttaagactaataaccacacaaggtgggtatctaagaaggcagctgttaatacattctccatctttcctgtctggcaacaggaaagatattattggtgagatagtgcaaaattgtgagaattggttatgttcgatgatgaataaattcaagatttttgaaggcttcactgctatttgggatgggaaggtgagtttacaaaatgaaaaaggtagatttttatgttacagaaatcagtaacgggtttcttgttgtgttaattacctttcacttgatttgccatgatgtttcttcctcattattgatctagaagtttgcctcttggatagtaactagcaacttagtatctactttaaaatttgtggcttttctcttcagggtcccaggccataaaacaacggagagctgtacttgcttgtcacttggaggaaccacatccttgagacagcctgctgtcttgtatgtcttcagtaggaaacttctgacacacacattcaagggagttcctgcccctgagaagtgttcccatagctttccagtcgcaggttactttcacactacgtcagcttctctggtgagatcagggatgttacatattacttgaaaatgatttcataggaagtgaggatggggcaagaaaggaggtagaagctgaattttgcttaacttcagaaggaaatctgatacttgccttggctagttctgatcaactaaagagcctgtgtctgtactggatgtgccaaagagtcaagttgtttctggaatatccagctcctctgaatgaacacagcttcctccctacctgtcttttatgggtgaaaagggaccgtctgatgagcatgatagacatcctgtacaggactcaagactgtttcattgcatttgaaagttggtgggaagtattttattctgctagagctcctaaccctcctagaaatatcttttcatgctctattaattcaattcattagtttaaaaagaaacagtgtgacataattttggtgtttacttcttaagttgtctccccaagggcatatatgtagcctctgaaaatgggatgatttcttctcaatcttccataaatttgaatatgcattttattcatttcttgacatgggctgtgtgactgttttccatcagcagttctggctttgtccacaagggagcaataaagtacgttagctttattctcaaccttctaaagaaagatcccacttttaaatctcttctggaatagcctcttagctcaaagcttattcatgtattttgattatttaagaaattttcccttattacaaagtccagtcgtcgttcatccctcatgatgccaagcaatgattgatgtgtgggtgtggagtccttgtgggtcaggcatcttaattaattagactttttacatattgatgatccccagattgaaagccaggaccttcccataggggcgcctttgtgtgctaaaggcagagcaggcaggcttctccactcctatctcctccgcaggccaccaccatcacatctataggaggaacaagagcactgggggaactctggagtatgagtaaggaaatgcttctcaccttctctgctccaaagagatatctgttacatcagggaacaagtcctctaggtcaggcacttcctcctgaccagtgcaacgggcactccaggttagaaactgtgtgtgctccctctctgtcagttacttgtctaagggctcctatccgtggtcatcagctctctggccatgagttctgtttgtgcttattgcagcagcatcttcacaacaaacaggtcagtaatcaacctgggaagggaaaagacgacagtaaatattaccccctgtagagccgggaggcatttacacctggaatggccttcttaactgatttctgcctggccacctcacccccagccaagtctgaacctgagcaataccaggcacagagaggtgtctacttgtaactccaacacttgacaaaaaacaaaactgaagctgtgattggtttaggcagcaagtggccaggtgcaacttgtttgtttttatttttgttttccccaacagtactgagatcacttgcacttttcctcatttcttaagaaaatccagtttgcttgccatgacttgtttagcgttaggtttacaaagcttgttgttgaatgttgaatatttgtccaaaggagtttgacaaaatagaagctgcttggtccctgttctgcctgctaggtcataaggatgaaggccatgtggctggggtacttatgtcaagtccagaatggggcagtgtccctctcctacctctctgcggagacgcaattgaaggtcaagtagactcagtgtagggcaggcagctgtcatgctgcaaagaagtttagaggagtctttgggttggggaggtgacaggtaggtaggacaggatctcttaagatgggaaagatactggggagaggagggctgcttggccccagggaactgcagtgaggtggaactgagctccgctcctgaatctccaaaggagcccatgctgcccggcttccctgagtcattttttccagcatcctgtcagatccctcaatgtactgatttcccccttgtgttaactataccgatattatttttttagcaattgaaatgcacttttttatttcaactcaatcatgattttaagtataaaaaatttatagattgttaaaactacttttttgtgtatttttaaccactcaatgtagcattgtatattttattcttgtgagactctggtacaggtgtgccgcctaatgatttttctgagatgctgggcctttggatgtgtacggtaaccaacttaatgctaatgttcaaagtacaaaacaaaaaaaagggg

SEQ ID NO: 1921 - DNA, 1590 bp, Homo sapien
gggtcacctccggcctgcaggtcaatgtcttgcaccagggcctttgggtggcatatgacagtttgggactgtccagtctctgtactttctggggcctctcctgttgaatggctaggcacctgcaggtgtaggggctcagggtcacctccggcctgcaggtcaatgtcttgctgctcctgtcctggggagggcagctctctcctagcccaacccaaaagcccccagaagcctccacacagccagctccggagtctgtccttggcttaggtggcttcaggactgggccaggcacctccctcacaggacaatcagacatgaagggtacctttcaatcacacaatcctacacagtcctagacattaggtgggtcctctgccctctgcaggtgacctcatcagagagcccagcagcatctgcccatttcctgtctacattctcctccctagtgcactgggagtgggaggagagcccaaagctcccccagatctttaggaagccccactgtcaggctgagtggagggccttagtgacaagtgataacttcagggaagtccagagtgggagacacatctggggtccagcttgctggtgggcactccctgctcatgcccacagcctcgaggggaaaaggtcataattgacaggtggttcctggggtcctgagatccagcccaagggatgggacgacatgctaggaaggggaaagtgacagaaggttcatatgcatcacacaccactttgacaaacccatacatagcattcactatagtgaatagaaaaactcacgaagcaccatagttccagcactttgcaaatatcccccacccaatacctttgaggtgagagttaccatcattgcctagttactggtgagaaaacagaggttccatgacgtgcctgaggcactgagggggatgatgtcagcacttgtggccgcacgtgcaggcacacgccctccatgtcacaccagtgcactcactttgcagatgaggagcgatgcctgagcactgggatggcatcattggcttgtgttggacagtgcctatataggagtccagcttctacccacttgttccagtctatccacattttccaccaacagaacgagtttactagaaacctctcctcaaattggtacaaggactacatgacatggcatgtgatgacacacacacagaggagatcctttttccagcatgcaggaagaggagatcccatacatgggcttgggggtggcttccctcactgcagtgtccggtcccccagcagctctgggagcaggagtgactatctccgttttgcagatgaggaagcagaaccataaaggtgaccttttttctttttcttttttacatttaaagttaaattggtctcccctcaaaaaatgcttagacttaattattttaattatcctcacatatactcctccggcttctttactgaagtgtaatttacacaccatcaaacttaccatttgaaaacgtgctattcggtaatctttagtataatcataaggttctgcaaccaaccaacaccattatctaatttcacgaacattttcatcaccacgaaacagaaacccataccaca

SEQ ID NO: 1922 - protein, 88 aa, Homo sapien
GSPPACRSMSCTRAFGWHMTVWDCPVSVLSGASPVEWLGTCRCRGSGSPPACRSMSCCSCPGEGSSLLAQPKSPQKPPHSQLRSLSLA

SEQ ID NO: 1923 - DNA, 2166 bp, Homo sapien
ggcaagctactggcacctgctgctctcaactaacctccacacaatggtgttcgcattttggaaggtctttctgatcctaagctgccttgcaggtcaggttagtgtggtgcaagtgaccatcccagacggtttcgtgaacgtgactgttggatctaatgtcactctcatctgcatctacaccaccactgtggcctcccgagaacagctttccatccagtggtctttcttccataagaaggagatggagccaatttctatttacttttctcaaggtggacaagctgtagccatcgggcaatttaaagatcgaattacagggtccaacgatccaggtaatgcatctatcactatctcgcatatgcagccagcagacagtggaatttacatctgcgatgttaacaaccccccagactttctcggccaaaaccaaggcatcctcaacgtcagtgtgttagtgaaaccttctaagcccctttgtagcgttcaaggaagaccagaaactggccacactatttccctttcctgtctctctgcgcttggaacaccttcccctgtgtactactggcataaacttgagggaagagacatcgtgccagtgaaagaaaacttcaacccaaccaccgggattttggtcattggaaatctgacaaattttgaacaaggttattaccagtgtactgccatcaacagacttggcaatagttcctgcgaaatcgatctcacttcttcacatccagaagttggaatcattgttggggccttgattggtagcctggtaggtgccgccatcatcatctctgttgtgtgcttcgcaaggaataaggcaaaagcaaaggcaaaagaaagaaattctaagaccatcgcggaacttgagccaatgacaaagataaacccaaggggagaaagcgaagcaatgccaagagaagacgctacccaactagaagtaactctaccatcttccattcatgagactggccctgataccatccaagaaccagactatgagccaaagcctactcaggagcctgccccagagcctgccccaggatcagagcctatggcagtgcctgaccttgacatcgagctggagctggagccagaaacgcagtcggaattggagccagagccagagccagagccagagtcagagcctggggttgtagttgagcccttaagtgaagatgaaaagggagtggttaaggcataggctggtggcctaagtacagcattaatcattaaggaacccattactgccatttggaattcaaataacctaaccaacctccacctcctccttccattttgaccaaccttcttctaacaaggtgctcattcctactatgaatccagaataaacacgccaagataacagctaaatcagcaagggttcctgtattaccaatatagaatactaacaattttactaacacgtaagcataacaaatgacagggcaagtgatttctaacttagttgagttttgcaacagtacctgtgttgttatttcagaaaatattatttctctctttttaactactctttttttttattttagacagagtcgcttgagcccaggaggtggaggttgcagtgggccgagattgtgccactgcactccaacctgggtgacagagtgagattccatctgaaaaacaaaaacaaaaacagaaaacaaacaaacaaaaaacaaaaaatccccacaactttgtcaaataatgtacaggcaaacactttcaaatataatttccttcagtgaatacaaaatgttgatatcataggtgatgtacaatttagttttgaatgagttattatgttatcactgtgtctgatgttatctactttgaaaggcagtccagaaaagtgttctaagtgaactcttaagatctattttagataatttcaactaattaaataacctgttttactgcctgtacattccacattaataaagcgataccaatcttatatgaatgctaatattactaaaatgcactgatatcacttcttcttcccctgttgaaaagctttctcatgatcatatttcacccacatctcaccttgaagaaacttacaggtagacttaccttttcacttgtggaattaatcatatttaaatcttactttaaggctcaataaataatactcataaaaaaaaaaaaaaaaaaaaa

SEQ ID NO: 1924 - protein, 370 aa, Homo sapien
QVSVVQVTIPDGFVNVTVGSNVTLICIYTTTVASREQLSIQWSFFHKKEMEPISIYFSQGGQAVAIGQFKDRITGSNDPGNASITISHMQPADSGIYICDVNNPPDFLGQNQGILNVSVLVKPSKPLCSVQGRPETGHTISLSCLSALGTPSPVYYWHKLEGRDIVPVKENFNPTTGILVIGNLTNFEQGYYQCTAINRLGNSSCEIDLTSSHPEVGIIVGALIGSLVGAAIIISVVCFARNKAKAKAKERNSKTIAELEPMTKINPRGESEAMPREDATQLEVTLPSSIHETGPDTIQEPDYEPKPTQEPAPEPAPGSEPMAVPDLDIELELEPETQSELEPEPEPEPESEPGVVVEPLSEDEKGVVKA

SEQ ID NO: 1925 - DNA, 1478 bp, Homo sapien
caaggatagaatatttcctgtggtttttcaggtggtttccaagatttgtcattcagatttataatacccaacttaattatttcagtgacatggtgaaagtgtatcaggataccatttcgcttactctcagagtttatgtagggcccttttgggattcagtgtctccgttccactgcacaaaattgcaagcaacgtgtatttaatgattcagctgataagcccttccttttatgaactatgagttagtattaaaatgaagggttgggatttcttaactttttagccatttaatcttttaacatgggatcaagcaacagaatgtagcagaagagtattatgaaaatgagaacattgaaagataatgttgatgcttgattctttcacttaataaggtgtctgagtatttaatgattttgttttgtagttcaattaccgtagaacaatctacttaacgctagattgtctgtcgggaccatgatgattctcaaataaatattgtatttaccaattctactcttaatttttttaaaactaaagacaagacaaaaaagtagatgtctctataatacatttatatgaaattaaattttcttagtttatttttgctttagaatgccagttgtaatcaaaggaccattggcaagacactggccattagtaaggcatcaaactttgagctttgctttactttaaaaaagttataccatgcaaggatagaagtagacataggcattcacataatcccctgtacatcctccagaggggttttgtcagatgaatttcccccaaagggcctcttagttaccatcagcttctctttgggacatatatatttctgactgtggtcatttgttaaggagaagtttagcagacgttattaatcaaatacatttaagagagctattgcttttcactttctcccatgatgtaatgctcttataataacaggttttgtggggtcctctttatacaactatctgatgacaatattcttcattcttgtaagctcagttaacatcttttcacttcccatctgataagtgctagctgctgatttttttgctcagtatctccatttatatcaatttattttcatctctagagcagcgcatcaggctgctctctcgtgaatatattgttacttttttctggcactggaatatacaactatccatgacagcaaaatttgagggccatattgagatcaccggctgatatgctgaccatgtaaatataagtttaaattgcttagttccacgttagaatagtttaatcaatttctgtcccagaaactggatatgaaacaggttagatgaggaagcttatatggaaaaaaattatctttcatcctctccacatatacatttttcctgagactaggtcatatgtatattcattttgtacacattggggaattggcatagtaatttattcaacaaacattaattagcacattcccttgtgacaaatctgtaaaa

SEQ ID NO: 1926 - protein, 66 aa, Homo sapien
RIEYFLWFFRWFPRFVIQIYNTQLNYFSDMVKVYQDTISLTLRVYVGPFWDSVSPFHCTKLQATCI

SEQ ID NO: 1927 - DNA, 1116 bp, Homo sapien
  Unsure 456-478: Unknown base
aaaaaaaaaaagaataccatggtagcacagtcataccctttaatggctcacattgttcaaacagcatgatattaacttttttttaaaatcaaagcacaaatgcttcatgcatataacttaaagagttttagatattttaagttagaaatgccaaaaatataaaaaccatgaagaaaaatttctatagaagttaggaaattaaaaatcgatcataagggaagcatctcaggtttttattgcagtatttggagatgaaaaatgactttctattgacacgatttgttatttcagcaaaatagaagtctgtcagtctaatgttggatgatctgatagtctttgcaagaaataattgcagagagtttctgcaatcactgggaaatagaaatctataaaaacatctgaaaaagtgtgagactgggccactgcctagggggatagccctgttatttctatggnnnnnnnnnnnnnnnnnnnnnnnctctgaaaaggaaattcttaattcctgtatttacagtgcctttttcagtaggtttttcctgcaaagggtgcttgtcagttactttgctttaatggataaaatctcaatttccaggccaaatgtaactttttttggtcttacatcttgatttacttgtacttaagaggttttttctccctgtaatatttttaaagcttttaaaattaacttcagcttaaagacaatataagtatgaatttctgtttccagccttgtagttctgactgtatttgtcaatggtttctatattaacgatagcattgttccattgtgtaatcctaaagttaaaaattctaagaatgagaaaaacagctatgaataaattataagtgaaagatagaaaaaacacatatttctatactaaatattgagagctttgtatttttcaagttggaatcaatatattgagaactgactttaaattttaaaactcttatgctgagaaaccctgacaggtaggtaaacccgtttgtctacataagatgttagcagtgtagtattgtgcacatcaagcatgttacaaaaactctaagttattctctgaagatacataagttttactagagatactctggatttattagtcctgcaaagccatt

SEQ ID NO: 1928 - protein, 27 aa, Homo sapien
KKKEYHGSTVIPFNGSHCSNSMILTFF

SEQ ID NO: 1929 - DNA, 1096 bp, Homo sapien
gttatgatcaaattagactgtgcctgattgggtggtaagatcactctgaaagaaagctcactgtgaagagatgaaaggtggaggcagagctgtgaggtcatggggaaaagcctgctttccttataagtcctgctgttcatgttggaataaggatctgctcttccttgtttccatgcattttgcaggattccaggtaccattaccacactcttctgacccatgaaaccaactggctgctcacacatcaccaaacaggttgggggttagccttcagcacaggtggatacatctgggattcactgagattcctgccctctcctgcttcctagtggtttgggacaggccctctgcccatcgtcagcagttttttgctttcatacaaacctggaaggcactggcatctgcctaggaaagtggatctgtgaagaacagatgaactcaatcctttctggagtctgacaaagaagggataggcttccttgacattgcctggtcctgacaaggcctccctgacattactcctccaatttcacagttaccttctgtaaatctattttctcatctactgaatagaatcaggcgccctttttgtcttcccacctcttatctcttggcaattttaaggggaattaatgcaagaacaactttagtgtctcttgggaaaacaagccaaccaaatacaaaacccattaagcctactagggtgagtcctcttaacatgggaaggcgatgattatgcaaacaccagagttccctcctcttcagttcctaagaataaagaacaggtatcaagaactttctttaaagttagtgtaactatagttaacaaagtatccattgaagtttagtgcctgtaggactgagccagtgctttatcaacccaacacatcatcaccatgtgcatactctagaaaaaaaaatagcttccttaaaagttacagaggctcttaacgtgttaaaaccgaaaaatcacatttttcttgatttcaaatatgttctacggccttactgttgggatgatatttagtatgtaacttagcattccaatttctcaagaatttttaggccgggtgcggtggctcatgcctgtagtccc

SEQ ID NO: 1930 - protein, 50 aa, Homo sapien
MKGGGRAVRSWGKACFPYKSCCSCWNKDLLFLVSMHFAGFQVPLPHSSDP

SEQ ID NO: 1931 - DNA, 1200 bp, Homo sapien
aagatataaaagctccagaaacgttgactgggaccactggagacactgaagaaggcaggggcccttagagtcttggttgccaaacagatttgcagatcaaggagaacccaggagtttcaaagaagcgctagtaaggtctctgagatccttgcactagctacatcctcagggtaggaggaagatggcttccagaagcatgcggctgctcctattgctgagctgcctggccaaaacaggagtcctgggtgatatcatcatgagacccagctgtgctcctggatggttttaccacaagtccaattgctatggttacttcaggaagctgaggaactggtctgatgccgagctcgagtgtcagtcttacggaaacggagcccacctggcatctatcctgagtttaaaggaagccagcaccatagcagagtacataagtggctatcagagaagccagccgatatggattggcctgcacgacccacagaagaggcagcagtggcagtggattgatggggccatgtatctgtacagatcctggtctggcaagtccatgggtgggaacaagcactgtgctgagatgagctccaataacaactttttaacttggagcagcaacgaatgcaacaagcgccaacacttcctgtgcaagtaccgaccatagagcaagaatcaagattctgctaactcctgcacagccccgtcctcttcctttctgctagcctggctaaatctgctcattatttcagaggggaaacctagcaaactaagagtgataagggccctactacactggcttttttaggcttagagacagaaactttagcattggcccagtagtggcttctagctctaaatgtttgccccgccatccctttccacagtatccttcttccctcctcccctgtctctggctgtctcgagcagtctagaagagtgcatctccagcctatgaaacagctgggtctttggccataagaagtaaagatttgaagacagaaggaagaaactcaggagtaagcttctagaccccttcagcttctacacccttctgccctctctccattgcctgcaccccaccccagccactcaactcctgcttgtttttcctttggccataggaaggtttaccagtagaatccttgctaggttgatgtgggccatacattcctttaataaaccattgtgtacataagaaaaaaaaaa

SEQ ID NO: 1932 - protein, 158 aa, Homo sapien
MASRSMRLLLLLSCLAKTGVLGDIIMRPSCAPGWFYHKSNCYGYFRKLRNWSDAELECQSYGNGAHLASILSLKEASTIAEYISGYQRSQPIWIGLHDPQKRQQWQWIDGAMYLYRSWSGKSMGGNKHCAEMSSNNNFLTWSSNECNKRQHFLCKYRP

SEQ ID NO: 1933 - DNA, 2712 bp, Homo sapien
caccggtcccccttcctgccaacgctgcatttggctcgggcccggtccatggcggcccctcggaccctgcgctgagccccggaggccagggcgtccggggctgcgccacttccgagggccgagcgctgccggtcccggcggtgcgacacggccgggaggaggagaacaacgcaaggggctcaaccgtcggtcgctggagccccccccggggcgtggcctcccgccccctcagctggggagggcggggctcgctgccccctgctgccgactgcgacccttacaggggagggagggcgcaggccgcgcggagatgaggaggaggctgcgcctacgcagggacgcattgctcacgctgctccttggcgcctccctgggcctcttactctatgcgcagcgcgacggcgcggccccgacggcgagcgcgccgcgagggcgagggagggcggcaccgaggcccacccccggaccccgcgcgttccagttacccgacgcgggtgcagccccgccggcctacgaaggggacacaccggcgccgcccacgcctacgggacccttttgacttcgcccgctatttgcgcgccaaggaccagcggcggtttccactgctcattaaccagccgcacaagtgccgcggcgacggcgcacccggtggccgcccggacctgcttattgctgtcaagtcggtggcagaggacttcgagcggcgccaagccgtgcgccagacgtggggcgcggagggtcgcgtgcagggggcgctggtgcgccgcgtgttcttgctgggcgtgcccaggggcgcaggctcgggcggggccgacgaagttggggagggcgcgcgaacccactggcgcgccctgctgcgggccgagagccttgcgtatgcggacatcctgctctgggccttcgacgacaccttttttaacctaacgctcaaggagatccactttctagcctgggcctcagctttctgccccgacgtgcgcttcgtttttaagggcgacgcagatgtgttcgtgaacgtgggaaatctcctggagttcctggcgccgcgggacccggcgcaagacctgcttgctggtgacgtaattgtgcatgcgcggcccatccgcacgcgggctagcaagtactacatccccgaggccgtgtacggcctgcccgcctatccggcctacgcgggcggcggtggctttgtgctttccggggccacgctgcaccgcctggctggcgcctgtgcgcaggtcgagctcttccccatcgacgacgtctttctgggcatgtgtctgcagcgcctgcggctcacgcccgagcctcaccctgccttccgcacctttggcatcccccagccttcagccgcgccgcatttgagcaccttcgacccctgcttttaccgtgagctggttgtagtgcacgggctctcggccgctgacatctggcttatgtggcgcctgctgcacgggccgcatgggccagcctgtgcgcatccacagcctgtcgctgcaggccccttccaatgggactcctagctccccactacagccccaagctcctaactcagacccagaatggagccggtttcccagattattgccgtgtatgtggttcttccctgatcaccaggtgcctgtctccacaggatcccaggggatgggggttaagcttggctcctggcggtccaccctgctggaaccagttgaaacccgtgtaatggtgaccctttgagcgagccaaggctgggtggtagatgaccatctcttgtccaacaggtcccagagcagtggatatgtctggtcctcctagtagcacagaggtgtgttctggtgtggtggcagggacttagggaatcctaccactctgctggatttggaaccccctaggctgacgcggacgtatgcagaggctctcaaggccaggccccacagggaggtggaggggctccggccgccacagcctgaattcatgaacctggcaggcactttgccatagctcatctgaaaacagatattatgcttcccacaacctctcctgggcccaggtgtggctgagcaccagggatggagccacacataagggacaaatgagtgcacggtcctacctagtctttcctcacctcctgaactcacacaacaatgccagtctcccactggaggctgtatcccctcagaggagccaaggaatgtcttcccctgagatgccaccactattaatttccccatatgcttcaaccacccccttgctcaaaaaaccaatacccacacttaccttaatacaaacatcccagcaacagcacatggcaggccattgctgagggcacaggtgctttattggagaggggatgtgggcaggggataaggaaggttcccccattccaggaggatgggaacagtcctggctgcccctgacagtggggatatgcaaggggctctggccaggccacagtccaaatgggaagacaccagtcagtcacaaaagtcgggagcgccacacaaacctggctataaggcccaggaaccatataggagcctgagacaggtcccctgcacattcatcattaaactatacaggatgaggctgtacatgagttaattacaaaagagtcatatttacaaaaatctgtacacacatttgaaaaactcacaaaattgtcatctatgtatcacaagttgctagaccaaaatattaaaaatgggataaaattataaaaaaaaaaaaaaaaaa

SEQ ID NO: 1934 - protein, 377 aa, Homo sapien
MRSATARPRRRARREGEGGRHRGPPPDPARSSYPTRVQPRRPTKGTHRRRPRLRDPFDFARYLRAKDQRRFPLLINQPHKCRGDGAPGGRPDLLIAVKSVAEDFERRQAVRQTWGAEGRVQGALVRRVFLLGVPRGAGSGGADEVGEGARTHWRALLRAESLAYADILLWAFDDTFFNLTLKEIHFLAWASAFCPDVRFVFKGDADVFVNVGNLLEFLAPRDPAQDLLAGDVIVHARPIRTRASKYYIPEAVYGLPAYPAYAGGGGFVLSGATLHRLAGACAQVELFPIDDVFLGMCLQRLRLTPEPHPAFRTFGIPQPSAAPHLSTFDPCFYRELVVVHGLSAADIWLMWRLLHGPHGPACAHPQPVAAGPFQWDS

SEQ ID NO: 1935 - DNA, 2343 bp, Homo sapien
aacgaagcgtgcgcgctttggtaaccggctagaaatcccgcacgcgcgcctgcctcctctccccaggcctgagctgcccctcccactgcctttccttcttcccgcgagtcagaagcttcgcgagggcccagagaggcggtggggtgggcgaccctacgccagctccgggcgggagaaagcccaccctctcccgcgccccaggaaaccgccggcgttcggcgctgcgcagagccatggaattctcctggctggagacgcgctgggcgcggcccttttacctggcgttcgtgttctgcctggccctggggctgctgcaggccattaagctgtacctgcggaggcagcggctgctgcgggacctgcgccccttcccagcgccccccacccactggttccttgggcaccagaagtttattcaggatgataacatggagaagcttgaggaaattattgaaaaataccctcgtgccttccctttctggattgggccctttcaggcatttttctgtatctatgacccagactatgcaaagacacttctgagcagaacagatcccaagtcccagtacctgcagaaattctcacctccacttcttggaaaaggactagcggctctagacggacccaagtggttccagcatcgtcgcctactaactcctggattccattttaacatcctgaaagcatacattgaggtgatggctcattctgtgaaaatgatgctggataagtgggagaagatttgcagcactcaggacacaagcgtggaggtctatgagcacatcaactcgatgtctctggatataatcatgaaatgcgctttcagcaaggagaccaactgccagacaaacagcacccatgatccttatgcaaaagccatatttgaactcagcaaaatcatatttcaccgcttgtacagtttgttgtatcacagtgacataattttcaaactcagccctcagggctaccgcttccagaagttaagccgagtgttgaatcagtacacagatacaataatccaggaaagaaagaaatccctccaggctggggtaaagcaggataacactccgaagaggaagtaccaggattttctggatattgtcctttctgccaaggatgaaagtggtagcagcttctcagatattgatgtacactctgaagtgagcacattcctgttggcaggacatgacaccttggcagcaagcatctcctggatcctttactgcctggctctgaaccctgagcatcaagagagatgccgggaggaggtcaggggcatcctgggggatgggtcttctatcacttgggaccagctgggtgagatgtcgtacaccacaatgtgcatcaaggagacgtgccgattgattcctgcagtcccgtccatttccagagatctcagcaagccacttaccttcccagatggatgcacattgcctgcagggatcaccgtggttcttagtatttggggtcttcaccacaaccctgctgtctggaaaaacccaaaggtctttgaccccttgaggttctctcaggagaattctgatcagagacacccctatgcctacttaccattctcagctggatcaaggaactgcattgggcaggagtttgccatgattgagttaaaggtaaccattgccttgattctgctccacttcagagtgactccagaccccaccaggcctcttactttccccaaccattttatcctcaagcccaagaatgggatgtatttgcacctgaagaaactctctgaatgttagatctcagggtacaatgattaaacgtactttgtttttcgaagttaaatttacagctaatgatccaagcagatagaaagggatcaatgtatggtgggaggattggaggttggtgggataggggtctctgtgaagagatccaaaatcatttctaggtacacagtgtgtcagctagatctgtttctatataactttgggagattttcagatcttttctgttaaactttcactactattaatgctgtatacaccaatagactttcatatattttctgttgtttttaaaatagttttcagaattatgcaagtaataagtgcatgtatgctcactgtcaaaaattcccaacactagaaaatcatgtagaataaaaattttaaatctcacttcacttagccgacattccatgccctgaccaatcctactgcttttcctaaaaacagaataatttggtgtgcattctttcagactttttcctatacattttatatgtagaaatgtagcaatgtatttgtatagatgtgatcattcctatattgttattgatttttttcacttaataaaaattcaccttattccttaaaa

SEQ ID NO: 1936 - protein, 509 aa, Homo sapien
MEFSWLETRWARPFYLAFVFCLALGLLQAIKLYLRRQRLLRDLRPFPAPPTHWFLGHQKFIQDDNMEKLEEIIEKYPRAFPFWIGPFQAFFCIYDPDYAKTLLSRTDPKSQYLQKFSPPLLGKGLAALDGPKWFQHRRLLTPGFHFNILKAYIEVMAHSVKMMLDKWEKICSTQDTSVEVYEHINSMSLDIIMKCAFSKETNCQTNSTHDPYAKAIFELSKIIFHRLYSLLYHSDIIFKLSPQGYRFQKLSRVLNQYTDTIIQERKKSLQAGVKQDNTPKRKYQDFLDIVLSAKDESGSSFSDIDVHSEVSTFLLAGHDTLAASISWILYCLALNPEHQERCREEVRGILGDGSSITWDQLGEMSYTTMCIKETCRLIPAVPSISRDLSKPLTFPDGCTLPAGITVVLSIWGLHHNPAVWKNPKVFDPLRFSQENSDQRHPYAYLPFSAGSRNCIGQEFAMIELKVTIALILLHFRVTPDPTRPLTFPNHFILKPKNGMYLHLKKLSEC

SEQ ID NO: 1937 - DNA, 1705 bp, Homo sapien
gtttttttcccttctgagcaatggagcttaccatctttatcctgagactggccatttacatcctgacatttcccttgtacctgctgaactttctgggcttgtggagctggatatgcaaaaaatggttcccctacttcttggtgaggttcactgtgatatacaacgaacagatggcaagcaagaagcgggagctcttcagtaacctgcaggagtttgcgggcccctccgggaaactctccctgctggaagtgggctgtggcacgggggccaacttcaagttctacccacctgggtgcagggtgacctgtattgaccccaaccccaactttgagaagtttttgatcaagagcattgcagagaaccgacacctgcagtttgagcgctttgtggtagctgccggggagaacatgcaccaggtggctgatggctctgtggatgtggtggtctgcaccctggtgctgtgctctgtgaagaaccaggagcggattctccgcgaggtgtgcagagtgctgagaccgggaggggctttctatttcatggagcatgtggcagctgagtgttcgacttggaattacttctggcaacaagtcctggatcctgcctggcaccttctgtttgatgggtgcaacctgaccagagagagctggaaggccctggagcgggccagcttctctaagctgaagctgcagcacatccaggccccactgtcctgggagttggtgcgccctcatatctatggatatgctgtgaaatagtgtgagctggcagttaagagctgaatggctcaaagaatttaaagcttcagttttacatttaaaatgctaagtgggagaagagaaaccttttttttggggggcggtttttttggtttgttgttggttttttttttttttttggcaagactccgtctcaaaaaaaaaaaaaaaaaaaaaaagaagtagagacagggagacagggtctcactgtgttgcctaggccggtcttgaactcctgggctcaagtgattctcccaccttgacctcctaaattgttgggattacaggtgtgagacagtgcacctggccgaaatagctcaagtttctgaaaaacaaatctgaatctatttgttattcttagcgtcactggtctggctttcagaattaacatacaaggttgccacacctagttctgcccagctttatgtcttttattccagtattccaccaaagtttgttttcctgcattccagttctcaagtcttaagataaagattgtacttgacagtttagtatatccataaaactatttgaggtggttaaggttcttgggttcattttccttaatactttgctgaatattgtagattgtaggcaatgaaaaagtctactaaattaggaaaaccttgaataattaggtatcctaggtaagagcccctaaacatcaagcaatctgtgagtctgtaaagaaataaatattttttggattattcttatctaattccacccctgttggaagatgatttctttgttctttgcaactatggaagctgtgaaaatcatcacaagtgcctctgaaagcgagtgttaggttggttagagggtttaatattttctgcaatggtttgtaggaattttaataaatgtagtatattttctgagatgattttgtaaaagtactattttaaatatcaaatcaaccaataaattcacatttgtgttaggaacag

SEQ ID NO: 1938 - protein, 244 aa, Homo sapien
MELTIFILRLAIYILTFPLYLLNFLGLWSWICKKWFPYFLVRFTVIYNEQMASKKRELFSNLQEFAGPSGKLSLLEVGCGTGANFKFYPPGCRVTCIDPNPNFEKFLIKSIAENRHLQFERFVVAAGENMHQVADGSVDVVVCTLVLCSVKNQERILREVCRVLRPGGAFYFMEHVAAECSTWNYFWQQVLDPAWHLLFDGCNLTRESWKALERASFSKLKLQHIQAPLSWELVRPHIYGYAVK

SEQ ID NO: 1939 - DNA, 1908 bp, Homo sapien
aaagaaacccgagacgttccgaagtcaacgcaagcaaaggggagtgcgggtcggggaggaatattcttttggaaacgtaatattggccttggggctctccagccctttgggacttccaatgggatcttagaagcagccgaagcagcgtgagggcggcagcccagggccagccacgatttgaacgctctgccttgcagctcttctggaccgaggagcccaaagccctaccctcaccattcaccaggtcctgtgggaagagcagcgtggaggtgggctgaggttagaaggtgcagagcgtggaagaagattgtgagctgagtattggacatctgttcttgaatagtccctgggcctgccataggaaaggaagttctccagggttacagttcttatccgcgtgaatacacatggctctgttacgaaaaattaatcaggtgctgctgttccttctgatcgtgaccctctgtgtgattctgtataagaaagttcataaggggactgtgcccaagaatgacgcagatgatgaatccgagactcctgaagaactggaagaagagattcctgtggtgatttgtgctgcagcagggaggatgggtgccactatggctgccatcaatagcatctacagcaacactgacgccaacatcttgttctatgtagtgggactccggaatactctgactcgaatacgaaaatggattgaacattccaaactgagagaaataaactttaaaatcgtggaattcaacccgatggtcctcaaagggaagatcagaccagactcatcgaggcctgaattgctccagcctctgaactttgttcgattttatctccctctacttatccaccaacacgagaaagtcatctatttggacgatgatgtaattgtacaaggtgatatccaagaactgtatgacaccaccttggccctgggccacgcggcggctttctcagatgactgcgatttgccctctgctcaggacataaacagactcgtgggacttcagaacacatatatgggctatctggactaccggaagaaggccatcaaggaccttggcatcagccccagcacctgctctttcaatcctggtgtgattgttgccaacatgacagaatggaagcaccagcgcatcaccaagcaattggagaaatggatgcaaaagaatgtggaggaaaacctctatagcagctccctgggaggaggggtggccacctccccaatgctgattgtgtttcatgggaaatattccacaattaaccccctgtggcacataaggcacctgggctggaatccagatgccagatattcggagcattttctgcaggaagctaaattactccactggaatggaagacataaaccttgggacttccctagtgttcacaacgacttatgggaaagctggtttgttcctgaccctgcagggatatttaaactcaatcaccatagctgatataactctacccttaaaatattccctgtatagaaatgtggaattgtccctttgtagccaactataacattgttctttatgaatattacctttgatacatatgatccacaatataaaaaccaaaaactactgtgtgcaaattataccttggaccatataggcattgattaacttctttaagtacatgtgataactatggaaatcaagattatgtgactgaaaaacataaaggaagagacccatctagataacagcaatcaacctgcttaattctgaatgacaattatatccacaaatttttaaaacttctacatgtatttttcacatgaagatctccttaacaggttgccaaccttttcttttataaaactattacatttaaaatatggacgtctgaaaaataaaatattcatcatttttacaaaaaaaaaaaaaaaaaaaaaaaaaaaaa

SEQ ID NO: 1940 - protein, 349 aa, Homo sapien
MALLRKINQVLLFLLIVTLCVILYKKVHKGTVPKNDADDESETPEELEEEIPVVICAAAGRMGATMAAINSIYSNTDANILFYVVGLRNTLTRIRKWIEHSKLREINFKIVEFNPMVLKGKIRPDSSRPELLQPLNFVRFYLPLLIHQHEKVIYLDDDVIVQGDIQELYDTTLALGHAAAFSDDCDLPSAQDINRLVGLQNTYMGYLDYRKKAIKDLGISPSTCSFNPGVIVANMTEWKHQRITKQLEKWMQKNVEENLYSSSLGGGVATSPMLIVFHGKYSTINPLWHIRHLGWNPDARYSEHFLQEAKLLHWNGRHKPWDFPSVHNDLWESWFVPDPAGIFKLNHHS

SEQ ID NO: 1941 - DNA, 2471 bp, Homo sapien
tacttctaaataaatgaattactcaatctcctatgaccatctatacatactccaccttcaaaaagtacatcaatattatatcattaaggaaatagtaaccttctcttctccaatatgcatgacatttttagacaatgcaattgtggcactggcacttatttcagtgaagaaaaactttgtggttctatggcattcatcatttgacaaatgcaagcatcttccttatcaatcagctcctattgaacttactagcactgactgtggaatccttaagggcccattacatttctgaagaagaaagctaagatgaaggacatgccactccgaattcatgtgctacttggcctagctatcactacactagtacaagccgtagataaaaaagtggattgtccacggttatgtacgtgtgaaatcaggccttggtttacacccagatccatttatatggaagcatctacagtggattgtaatgatttaggtcttttaactttcccagccagattgccagctaacacacagattcttctcctacagactaacaatattgcaaaaattgaatactccacagactttccagtaaaccttactggcctggatttatctcaaaacaatttatcttcagtcaccaatattaatgtaaagaagatgcctcagctcctttctgtgtacctagaggaaaacaaacttactgaactgcctgaaaaatgtctgtccgaactgagcaacttacaagaactctatattaatcacaacttgctttctacaatttcacctggagcctttattggcctacataatcttcttcgacttcatctcaattcaaatagattgcagatgatcaacagtaagtggtttgatgctcttccaaatctagagattctgatgattggggaaaatccaattatcagaatcaaagacatgaactttaagcctcttatcaatcttcgcagcctggttatagctggtataaacctcacagaaataccagataacgccttggttggactggaaaacttagaaagcatctctttttacgataacaggcttattaaagtaccccatgttgctcttcaaaaagttgtaaatctcaaatttttggatctaaataaaaatcctattaatagaatacgaaggggtgattttagcaatatgctacacttaaaagagttggggataaataatatgcctgagctgatttccatcgatagtcttgctgtggataacctgccagatttaagaaaaatagaagctactaacaaccctagattgtcttacattcaccccaatgcatttttcagactccccaagctggaatcactcatgctgaacagcaatgctctcagtgccctgtaccatggtaccattgagtctctgccaaacctcaaggaaatcagcatacacagtaaccccatcaggtgtgactgtgtcatccgttggatgaacatgaacaaaaccaacattcgattcatggagccagattcactgttttgcgtggacccacctgaattccaaggtcagaatgttcggcaagtgcatttcagggacatgatggaaatttgtctccctcttatagctcctgagagctttccttctaatctaaatgtagaagctgggagctatgtttcctttcactgtagagctactgcagaaccacagcctgaaatctactggataacaccttctggtcaaaaactcttgcctaataccctgacagacaagttctatgtccattctgagggaacactagatataaatggcgtaactcccaaagaagggggtttatatacttgtatagcaactaacctagttggcgctgacttgaagtctgttatgatcaaagtggatggatcttttccacaagataacaatggctctttgaatattaaaataagagatattcaggccaattcagttttggtgtcctggaaagcaagttctaaaattctcaaatctagtgttaaatggacagcctttgtcaagactgaaaattctcatgctgcgcaaagtgctcgaataccatctgatgtcaaggtatataatcttactcatctgaatccatcaactgagtataaaatttgtattgatattcccaccatctatcagaaaaacagaaaaaaatgtgtaaatgtcaccaccaaaggtttgcaccctgatcaaaaagagtatgaaaagaataataccacaacacttatggcctgtcttggaggccttctggggattattggtgtgatatgtcttatcagctgcctctctccagaaatgaactgtgatggtggacacagctatgtgaggaattacttacagaaaccaacctttgcattaggtgagctttatcctcctctgataaatctctgggaagcaggaaaagaaaaaagtacatcactgaaagtaaaagcaactgttataggtttaccaacaaatatgtcctaaaaaccaccaaggaaacctactccaaaaatgaacaaaaa

SEQ ID NO: 1942 - protein, 708 aa, Homo sapien; identical to SEQ ID NO: 849

SEQ ID NO: 1943 - DNA, 1745 bp, Homo sapien
gtgcggtccgtcggtggcctagagatgctgctgccgcggttgcagttgtcgcgcacgcctctgcccgccagcccgctccaccgccgtagcgcccgagtgtcggggggcgcacccgagtcgggccatgaggccgggaaccgcgctacaggccgtgctgctggccgtgctgctggtggggctgcgggccgcgacgggtcgcctgctgagtgggcagccagtctgccggggagggacacagaggccttgttataaagtcatttacttccatgatacttctcgaagactgaactttgaggaagccaaagaagcctgcaggagggatggaggccagctagtcagcatcgagtctgaagatgaacagaaactgatagaaaagttcattgaaaacctcttgccatctgatggtgacttctggattgggctcaggaggcgtgaggagaaacaaagcaatagcacagcctgccaggacctttatgcttggactgatggcagcatatcacaatttaggaactggtatgtggatgagccgtcctgcggcagcgaggtctgcgtggtcatgtaccatcagccatcggcacccgctggcatcggaggcccctacatgttccagtggaatgatgaccggtgcaacatgaagaacaatttcatttgcaaatattctgatgagaaaccagcagttccttctagagaagctgaaggtgaggaaacagagctgacaacacctgtacttccagaagaaacacaggaagaagataccaaaaaaacatttaaagaaagtagagaagctgccttgaatctggcctacatcctaatccccagcattccccttctcctcctccttgtggtcaccacagttgtatgttgggtttggatctgtagaaaaagaaaacgggagcagccagaccctagcacaaagaagcaacacaccatctggccctctcctcaccagggaaacagcccggacctagaggtctacaatgtcataagaaaacaaagcgaagctgacttagctgagacccggccagacctgaagaatatttcattccgagtgtgttcgggagaagccactcccgatgacatgtcttgtgactatgacaacatggctgtgaacccatcagaaagtgggtttgtgactctggtgagcgtggagagtggatttgtgaccaatgacatttatgagttctccccagaccaaatggggaggagtaaggagtctggatgggtggaaaatgaaatatatggttattaggacatataaaaaactgaaactgacaacaatggaaaagaaatgataagcaaaatcctcttattttctataaggaaaatacacagaaggtctatgaacaagcttagatcaggtcctgtggatgagcatgtggtccccacgacctcctgttggacccccacgttttggctgtatcctttatcccagccagtcatccagctcgaccttatgagaaggtaccttgcccaggtctggcacatagtagagtctcaataaatgtcacttggttggttgtatccaacttttaagggacagagctttacctggcagtgataaagatgggctgtggagcttggaaaaccacctctgttttccttgctctatacagcagcacatattatcatacagacagaaaatccagaatcttttcaaagcccacatatggtagcacaggttggcctgtgcatcggcaattctcatatctgtttttttcaaagaataaaatcaaataaagagcagg

SEQ ID NO: 1944 - protein, 374 aa, Homo sapien [sequence omitted]

SEQ ID NO: 1945 - DNA, 2181 bp, Homo sapien
ggcacgagggatgcaaggagatgagacagttagatttacttcctcttttctaatctgagaggtttcatgttgaagaaaatcagtgttggggttgcaggagacctaaacacagtcaccatgaagctgggctgtgtcctcatggcctgggccctctacctttcccttggtgtgctctgggtggcccagatgctactggctgccagttttgagacgctgcagtgtgagggacctgtctgcactgaggagagcagctgccacacggaggatgacttgactgatgcaagggaagctggcttccaggtcaaggcctacactttcagtgaacccttccacctgattgtgtcctatgactggctgatcctccaaggtccagccaagccagtttttgaaggggacctgctggttctgcgctgccaggcctggcaagactggccactgactcaggtgaccttctaccgagatggctcagctctgggtccccccgggcctaacagggaattctccatcaccgtggtacaaaaggcagacagcgggcactaccactgcagtggcatcttccagagccctggtcctgggatcccagaaacagcatctgttgtggctatcacagtccaagaactgtttccagcgccaattctcagagctgtaccctcagctgaaccccaagcaggaagccccatgaccctgagttgtcagacaaagttgcccctgcagaggtcagctgcccgcctcctcttctccttctacaaggatggaaggatagtgcaaagcagggggctctcctcagaattccagatccccacagcttcagaagatcactccgggtcatactggtgtgaggcagccactgaggacaaccaagtttggaaacagagcccccagctagagatcagagtgcagggtgcttccagctctgctgcacctcccacattgaatccagctcctcagaaatcagctgctccaggaactgctcctgaggaggcccctgggcctctgcctccgccgccaaccccatcttctgaggatccaggcttttcttctcctctggggatgccagatcctcatctgtatcaccagatgggccttcttctcaaacacatgcaggatgtgagagtcctcctcggtcacctgctcatggagttgagggaattatctggccaccagaagcctgggaccacaaaggctactgctgaatagaagtaaacagttcatccatgatctcacttaaccaccccaataaatctgattctttattttctcttcctgtcctgcacatatgcataagtacttttacaagttgtcccagtgttttgttagaataatgtagttaggtgagtgtaaataaatttatataaagtgagaattagagtttagctataattgtgtattctctcttaacacaacagaattctgctgtctagatcaggaatttctatctgttatatcgaccagaatgttgtgatttaaagagaactaatggaagtggattgaatacagcagtctcaactgggggcaattttgccccccagaggacattgggcaatgtttggagacattttggtcattatacttggggggttgggggatggtgggatgtgtgtgctactggcatccagtaaatagaagccaggggtgccgctaaacatcctataatgcacagggcagtaccccacaacgaaaaataatctggcccaaaatgtcagttgtactgagtttgagaaaccccagcctaatgaaaccctaggtgttgggctctggaatgggactttgtcccttctaattattatctctttccagcctcattcagctattcttactgacataccagtctttagctggtgctatggtctgttctttagttctagtttgtatcccctcaaaagccattatgttgaaatcctaatccccaaggtgatggcattaagaagtgggcctttgggaagtgattagatcaggagtgcagagccctcatgattaggattagtgcccttatttaaaaaggccccagagagctaactcacccttccaccatatgaggacgtggcaagaagatgacatgtatgagaaccaaaaaacagctgtcgccaaacaccgactctgtcgttgccttgatcttgaacttccagcctccagaactatgagaaataaaattctgttgtttgtaaaaaaaaaaaaaaaaaa

SEQ ID NO: 1946 - protein, 359 aa, Homo sapien
MKLGCVLMAWALYLSLGVLWVAQMLLAASFETLQCEGPVCTEESSCHTEDDLTDAREAGFQVKAYTFSEPFHLIVSYDWLILQGPAKPVFEGDLLVLRCQAWQDWPLTQVTFYRDGSALGPPGPNREFSITVVQKADSGHYHCSGIFQSPGPGIPETASVVAITVQELFPAPILRAVPSAEPQAGSPMTLSCQTKLPLQRSAARLLFSFYKDGRIVQSRGLSSEFQIPTASEDHSGSYWCEAATEDNQVWKQSPQLEIRVQGASSSAAPPTLNPAPQKSAAPGTAPEEAPGPLPPPPTPSSEDPGFSSPLGMPDPHLYHQMGLLLKHMQDVRVLLGHLLMELRELSGHQKPGTTKATAE

SEQ ID NO: 1947 - DNA, 2651 bp, Homo sapien
aggaataaaaccacagaagaaaatggagagaaggggactgaaatattcagagcttctgcagtgattcccagcaaggacaaagccgcctttttcctgagttatgaggagcttctgcagaggcgcctgggcaagtacgagcacagcatcagcgtgcggccccagcagctgtccgggaggctgagcgtggacgtgaatatcctggagagcgcgggcatcgcatccctggaggtgctgccgcttcacaacagcaggcagaggggcagtgggcgcggggaagatgattctgggcctcccccatctactgtcattaaccaaaatgaaacatttgccaacataatttttaaacctactgtagtacaacaagccaggattgcccagaatggaattttgggagactttatcattagatatgacgtcaatagagaacagagcattggggacatccaggttctaaatggctattttgtgcactactttgctcctaaagaccttcctcctttacccaagaatgtggtattcgtgcttgacagcagtgcttctatggtgggaaccaaactccggcagaccaaggatgccctcttcacaattctccatgacctccgaccccaggaccgtttcagtatcattggattttccaaccggatcaaagtatggaaggaccacttgatatcagtcactccagacagcatcagggatgggaaagtgtacattcaccatatgtcacccactggaggcacagacatcaacggggccctgcagagggccatcaggctcctcaacaagtacgtggcccacagtggcattggagaccggagcgtgtccctcatcgtcttcctgacggatgggaagcccacggtcggggagacgcacaccctcaagatcctcaacaacacccgagaggccgcccgaggccaagtctgcatcttcaccattggcatcggcaacgacgtggacttcaggctgctggagaaactgtcgctggagaactgtggcctcacacggcgcgtgcacgaggaggaggacgcaggctcgcagctcatcgggttctacgatgaaatcaggaccccgctcctctctgacatccgcatcgattatccccccagctcagtggtgcaggccaccaagaccctgttccccaactacttcaacggctcggagatcatcattgcggggaagctggtggacaggaagctggatcacctgcacgtggaggtcaccgccagcaacagtaagaaattcatcatcctgaagacagatgtgcctgtgcggcctcagaaggcagggaaagatgtcacaggaagccccaggcctggaggcgatggagagggggaccccaaccacaccgagcgtctctggagctacctcaccacaaaggagctgctgagctcctggctgcaaagtgacgatgaaccggagaaggagcggctgcggcagcgggcccaggccctggctgtgagctaccgcttcctcactcccttcacctccatgaagctgagggggccggtcccacgcatggacggcctggaggaggcccacggcatgtcggctgccatgggacccgaaccggtggtgcagagcgtgcgaggagctggcacgcagccaggacctttgctcaagaagccataccagccaagaattaaaatctctaaaacatcagttcgtggcttcagaagggaagaacagattttttcaaatgtcatgaaatttccttttgccagcatcctggaactataataaaaattcagaggaaagaacaacctatgactgggttttgttctgctgtgtccagatcatcctctggaagtcttgattgttgcctttctgctgctgtgctgtacgtgcaagttcctaaagccagggacatcccggagatgagctgtggatatagagtccgcacagcctgcgggagacagaatgtaattccttccaacacacacacacaggctttatggaatgccagaaaagcttcctcttggatgctgcctggagtaatgactttttgaccctcccctcttttttggagcaagcactatctttccttgtaaaggaatttggacaatttgagtagaaatggtgtggtatgtgcacatagaaactctcagaaaactgtcagatgagctagacagttgtcctctatctccatgggtcccgcatcccaaggatcgaaccaacaacagatcaaaaatacgtgaaaaaggaattgcatctgtattgaatgtgtacggactttttttcttgtctttgttccttaaacaatgtagtgtaacaactatttacatcgcatctcctttgcattcattattataagtaaactagagatgatttaaagtgtatagaaaggctgcgtgcagtggctaatgtctgtaatcccagcactttgagaggccgaggcaggtggatcacctgaggtcaggagttcgagaccagcctggccaacgtggtgaaaccccatctctactaaaaatacaataattagctgggcatggtggtgcacgcctgtaatcccagctattcgggaggctgaggcaggagaatcgcttgaacccaggaggcagagattgcagtgaaccgagattgcaccattgcactccagcctgggtgacagagtgaacctccgtctcaaaaacaaaataaataaataagaataaatt

SEQ ID NO: 1948 - protein, 397 aa, Homo sapien [sequence omitted]

SEQ ID NO: 1949 - DNA, 3002 bp, Homo sapien
gtggcttggtattcactggcaggtttcagacatttagatctttcttttaatgactaacaccatgcctatctgtggagaagctggcaacatgtcacacctggaaattgtttttcaacattaatactattatttggcagtaatccagattgcttttgccaccaacctgaagacatatagaggcagaaggacaggaataattctatttgtttcctgttttgaaacttccatctgtaaggctatcaaaaggagatgtgagagagggtattgagtctggcctgacaatgcagttcttaaaccaaaggtccattatgcttctcctctctgagaatcctgacttacctcaacaacggagacatggcacagtagccagcttggagacttctcagccaatgctctgagatcaagtcgaagacccaatatacagggttttgagctcatcttcatcattcatatgaggaaataagtggtaaaatccttggaaatacaatgagactcatcagaaacatttacatattttgtagtattgttatgacagcagagggtgatgctccagagctgccagaagaaagggaactgatgaccaactgctccaacatgtctctaagaaaggttcccgcagacttgaccccagccacaacgacactggatttatcctataacctcctttttcaactccagagttcagattttcattctgtctccaaactgagagttttgattctatgccataacagaattcaacagctggatctcaaaacctttgaattcaacaaggagttaagatatttagatttgtctaataacagactgaagagtgtaacttggtatttactggcaggtctcaggtatttagatctttcttttaatgactttgacaccatgcctatctgtgaggaagctggcaacatgtcacacctggaaatcctaggtttgagtggggcaaaaatacaaaaatcagatttccagaaaattgctcatctgcatctaaatactgtcttcttaggattcagaactcttcctcattatgaagaaggtagcctgcccatcttaaacacaacaaaactgcacattgttttaccaatggacacaaatttctgggttcttttgcgtgatggaatcaagacttcaaaaatattagaaatgacaaatatagatggcaaaagccaatttgtaagttatgaaatgcaacgaaatcttagtttagaaaatgctaagacatcggttctattgcttaataaagttgatttactctgggacgaccttttccttatcttacaatttgtttggcatacatcagtggaacactttcagatccgaaatgtgacttttggtggtaaggcttatcttgaccacaattcatttgactactcaaatactgtaatgagaactataaaattggagcatgtacatttcagagtgttttacattcaacaggataaaatctatttgcttttgaccaaaatggacatagaaaacctgacaatatcaaatgcacaaatgccacacatgcttttcccgaattatcctacgaaattccaatatttaaattttgccaataatatcttaacagacgagttgtttaaaagaactatccaactgcctcacttgaaaactctcattttgaatggcaataaactggagacactttctttagtaagttgctttgctaacaacacacccttggaacacttggatctgagtcaaaatctattacaacataaaaatgatgaaaattgctcatggccagaaactgtggtcaatatgaatctgtcatacaataaattgtctgattctgtcttcaggtgcttgcccaaaagtattcaaatacttgacctaaataataaccaaatccaaactgtacctaaagagactattcatctgatggccttacgagaactaaatattgcatttaattttctaactgatctccctggatgcagtcatttcagtagactttcagttctgaacattgaaatgaacttcattctcagcccatctctggattttgttcagagctgccaggaagttaaaactctaaatgcgggaagaaatccattccggtgtacctgtgaattaaaaaatttcattcagcttgaaacatattcagaggtcatgatggttggatggtcagattcatacacctgtgaataccctttaaacctaaggggaattaggttaaaagacgttcatctccacgaattatcttgcaacacagctctgttgattgtcaccattgtggttattatgctagttctggggttggctgtggccttctgctgtctccactttgatctgccctggtatctcaggatgctaggtcaatgcacacaaacatggcacagggttaggaaaacaacccaagaacaactcaagagaaatgtccgattccacgcatttatttcatacagtgaacatgattctctgtgggtgaagaatgaattgatccccaatctagagaaggaagatggttctatcttgatttgcctttatgaaagctactttgaccctggcaaaagcattagtgaaaatattgtaagcttcattgagaaaagctataagtccatctttgttttgtctcccaactttgtccagaatgagtggtgccattatgaattttactttgcccaccacaatctcttccatgaaaattctgatcatataattcttatcttactggaacccattccattctattgcattcccaccaggtatcataaactgaaagctctcctggaaaaaaaagcatacttggaatggcccaaggataggcgtaaatgtgggcttttctgggcaaaccttcgagctgctattaatgttaatgtattagccaccagagaaatgtatgaactgcagacattcacagagttaaatgaagagtctcgaggttctacaatctctctgatgagaacagattgtctataaaatcccacagtccttgggaagttggggaccacatacactgttgggatgtacattgatacaacctttatgatggcaatttg

SEQ ID NO: 1950 - protein, 811 aa, Homo sapien
MRLIRNIYIFCSIVMTAEGDAPELPEERELMTNCSNMSLRKVPADLTPATTTLDLSYNLLFQLQSSDFHSVSKLRVLILCHNRIQQLDLKTFEFNKELRYLDLSNNRLKSVTWYLLAGLRYLDLSFNDFDTMPICEEAGNMSHLEILGLSGAKIQKSDFQKIAHLHLNTVFLGFRTLPHYEEGSLPILNTTKLHIVLPMDTNFWVLLRDGIKTSKILEMTNIDGKSQFVSYEMQRNLSLENAKTSVLLLNKVDLLWDDLFLILQFVWHTSVEHFQIRNVTFGGKAYLDHNSFDYSNTVMRTIKLEHVHFRVFYIQQDKIYLLLTKMDIENLTISNAQMPHMLFPNYPTKFQYLNFANNILTDELFKRTIQLPHLKTLILNGNKLETLSLVSCFANNTPLEHLDLSQNLLQHKNDENCSWPETVVNMNLSYNKLSDSVFRCLPKSIQILDLNNNQIQTVPKETIHLMALRELNIAFNFLTDLPGCSHFSRLSVLNIEMNFILSPSLDFVQSCQEVKTLNAGRNPFRCTCELKNFIQLETYSEVMMVGWSDSYTCEYPLNLRGIRLKDVHLHELSCNTALLIVTIVVIMLVLGLAVAFCCLHFDLPWYLRMLGQCTQTWHRVRKTTQEQLKRNVRFHAFISYSEHDSLWVKNELIPNLEKEDGSILICLYESYFDPGKSISENIVSFIEKSYKSIFVLSPNFVQNEWCHYEFYFAHHNLFHENSDHIILILLEPIPFYCIPTRYHKLKALLEKKAYLEWPKDRRKCGLFWANLRAAINVNVLATREMYELQTFTELNEESRGSTISLMRTDCL

SEQ ID NO: 1951 - DNA, 3185 bp, Homo sapien
aacttctagaagttgaagttacaaaggtatatagaaggtacacagaatcagaaaagattataaaagaaagcaagatttttgttagtgacgtcctgtttcctctgaagagtaatagttggaatcaaaagagtcaacgcaatgaactgttatttactgctgcgttttatgttgggaattcctctcctatggccttgtcttggagcaacagaaaactctcaaacaaagaaagtcaagcagccagtgcgatctcatttgagagtgaagcgtggctgggtgtggaaccaattttttgtaccagaggaaatgaatacgactagtcatcacatcggccagctaagatctgatttagacaatggaaacaattctttccagtacaagcttttgggagctggagctggaagtacttttatcattgatgaaagaacaggtgacatatatgccatacagaagcttgatagagaggagcgatccctctacatcttaagagcccaggtaatagacatcgctactggaagggctgtggaacctgagtctgagtttgtcatcaaagtttcggatatcaatgacaatgaaccaaaattcctagatgaaccttatgaggccattgtaccagagatgtctccagaaggaacattagttatccaggtgacagcaagtgatgctgacgatccctcaagtggtaataatgctcgtctcctctacagcttacttcaaggccagccatatttttctgttgaaccaacaacaggagtcataagaatatcttctaaaatggatagagaactgcaagatgagtattgggtaatcattcaagccaaggacatgattggtcagccaggagcgttgtctggaacaacaagtgtattaattaaactttcagatgttaatgacaataagcctatatttaaagaaagtttataccgcttgactgtctctgaatctgcacccactgggacttctataggaacaatcatggcatatgataatgacataggagagaatgcagaaatggattacagcattgaagaggatgattcgcaaacatttgacattattactaatcatgaaactcaagaaggaatagttatattaaaaaagaaagtggattttgagcaccagaaccactacggtattagagcaaaagttaaaaaccatcatgttcctgagcagctcatgaagtaccacactgaggcttccaccactttcattaagatccaggtggaagatgttgatgagcctcctcttttcctccttccatattatgtatttgaagtttttgaagaaaccccacagggatcatttgtaggcgtggtgtctgccacagacccagacaataggaaatctcctatcaggtattctattactaggagcaaagtgttcaatatcaatgataatggtacaatcactacaagtaactcactggatcgtgaaatcagtgcttggtacaacctaagtattacagccacagaaaaatacaatatagaacagatctcttcgatcccactgtatgtgcaagttcttaacatcaatgatcatgctcctgagttctctcaatactatgagacttatgtttgtgaaaatgcaggctctggtcaggtaattcagactatcagtgcagtggatagagatgaatccatagaagagcaccatttttactttaatctatctgtagaagacactaacaattcaagttttacaatcatagataatcaagataacacagctgtcattttgactaatagaactggttttaaccttcaagaagaacctgtcttctacatctccatcttaattgccgacaatggaatcccgtcacttacaagtacaaacacccttaccatccatgtctgtgactgtggtgacagtgggagcacacagacctgccagtaccaggagcttgtgctttccatgggattcaagacagaagtcatcattgctattctcatttgcattatgatcatatttgggtttatttttttgactttgggtttaaaacaacggagaaaacagattctatttcctgagaaaagtgaagatttcagagagaatatattccaatatgatgatgaagggggtggagaagaagatacagaggcctttgatatagcagagctgaggagtagtaccataatgcgggaacgcaagactcggaaaaccacaagcgctgagatcaggagcctatacaggcagtctttgcaagttggccccgacagtgccatattcaggaaattcattctggaaaagctcgaagaagctaatactgatccgtgtgcccctccttttgattccctccagacctacgcttttgagggaacagggtcattagctggatccctgagctccttagaatcagcagtctctgatcaggatgaaagctatgattaccttaatgagttgggacctcgctttaaaagattagcatgcatgtttggttctgcagtgcagtcaaataattagggctttttaccatcaaaatttttaaaagtgctaatgtgtattcgaacccaatggtagtcttaaagagttttgtgccctggctctatggcggggaaagccctagtctatggagttttctgatttccctggagtaaatactccatggttattttaagctacctacatgctgtcattgaacagagatgtggggagaaatgtaaacaatcagctcacaggcatcaatacaaccagatttgaagtaaaataatttaggaagatattaaaagtagatgagaggacacaagatgtagtcgatccttatgcgattatatcattatttacttaggaaagagtaaaaataccaaacgagaaaatttaaaggagcaaaaatttgcaagtcaaatagaaatgtacaaatcgagataacatttacatttctatcatattgacatgaaaattgaaaatgtatagtcagagaaattttcatgaattattccatgaagtattgtttcctttatttaaaaaaaaaaaaaaaaaaaaagaatgctaggtaatcttcgtagaaaactagaaagtatgataaacaacagttggaggaatccatggaaaatagacgagaaaatgtaaataaggctttctggggatcacagaacttttgtatgaataaaagccttataaaaccagctctggcatatgactaaaatattcctctactatttttcaatgtcatctaatgcaaacgctcaacc

SEQ ID NO: 1952 - protein, 772 aa, Homo sapien
MNCYLLLRFMLGIPLLWPCLGATENSQTKKVKQPVRSHLRVKRGWVWNQFFVPEEMNTTSHHIGQLRSDLDNGNNSFQYKLLGAGAGSTFIIDERTGDIYAIQKLDREERSLYILRAQVIDIATGRAVEPESEFVIKVSDINDNEPKFLDEPYEAIVPEMSPEGTLVIQVTASDADDPSSGNNARLLYSLLQGQPYFSVEPTTGVIRISSKMDRELQDEYWVIIQAKDMIGQPGALSGTTSVLIKLSDVNDNKPIFKESLYRLTVSESAPTGTSIGTIMAYDNDIGENAEMDYSIEEDDSQTFDIITNHETQEGIVILKKKVDFEHQNHYGIRAKVKNHHVPEQLMKYHTEASTTFIKIQVEDVDEPPLFLLPYYVFEVFEETPQGSFVGVVSATDPDNRKSPIRYSITRSKVFNINDNGTITTSNSLDREISAWYNLSITATEKYNIEQISSIPLYVQVLNINDHAPEFSQYYETYVCENAGSGQVIQTISAVDRDESIEEHHFYFNLSVEDTNNSSFTIIDNQDNTAVILTNRTGFNLQEEPVFYISILIADNGIPSLTSTNTLTIHVCDCGDSGSTQTCQYQELVLSMGFKTEVIIAILICIMIIFGFIFLTLGLKQRRKQILFPEKSEDFRENIFQYDDEGGGEEDTEAFDIAELRSSTIMRERKTRKTTSAEIRSLYRQSLQVGPDSAIFRKFILEKLEEANTDPCAPPFDSLQTYAFEGTGSLAGSLSSLESAVSDQDESYDYLNELGPRFKRLACMFGSAVQSNN

SEQ ID NO: 1953 - DNA, 860 bp, Mus musculus
gaaagacgtggtcctgacagacagacaatcctattccctaccaaaatgaagatgctgctgctgctgtgtttgggactgaccctagtctgtgtccatgcagaagaagctagttctacgggaaggaactttaatgtagaaaagattaatggggaatggcatactattatcctggcctctgacaaaagagaaaagatagaagaacatggcaactttagactttttctggagcaaatccatgtcttggagaattccttagttcttaaagtccatactgtaagagatgaagagtgctccgaattatctatggttgctgacaaaacagaaaaggctggtgaatattctgtgacgtatgatggattcaatacatttactatacctaagacagactatgataactttcttatggctcacctcattaacgaaaaggatggggaaaccttccagctgatggggctctatggccgagaaccagatttgagttcagacatcaaggaaaggtttgcacaactatgtgaggagcatggaatccttagagaaaatatcattgacctatccaatgccaatcgctgcctccaggcccgagaatgaagaatggcctgagcctccagtgttgagtggacacttctcaccaggactccaccatcatcccttcctatccatacagcatccccagtataaattctgtgatctgcattccatcctgtctcactgagaagtccaattccagtctatcaacatgttacctaggatacctcatcaagaatcaaagacttctttaaatttctctttgatacacccttgacaatttttcatgaaattattcctcttcctgttcaataaatgattacccttgcacttaa

SEQ ID NO: 1954 - protein, 180 aa, Mus musculus
MKMLLLLCLGLTLVCVHAEEASSTGRNFNVEKINGEWHTIILASDKREKIEEHGNFRLFLEQIHVLENSLVLKVHTVRDEECSELSMVADKTEKAGEYSVTYDGFNTFTIPKTDYDNFLMAHLINEKDGETFQLMGLYGREPDLSSDIKERFAQLCEEHGILRENIIDLSNANRCLQARE

SEQ ID NO: 1955 - DNA, 2103 bp, Homo sapien
ctcagactacaggtgtgagccaccatgcccggccttctcctttaagtattgttggcctcactttcccaactaaaatgggagctcactaagaacaaaggctgttccttcatcttatacttagtaccttgaaagggcctaccacacagtaggtggtcacgtgttagtctgttaggtcttttggattttctaggtagacaatcacatcgattgcaaataatagtctttctcttttcagtctttgtatttcttttttcttgttttattgcattgactgagctcatcagtgaaatgttgaatagtagcaatgatggagggcaccccaatcttattatgctcaatactcattaatttatgcaataggaatgtaaagtacctactgcaggtcaaatcctgtgcctggggataacagtgtaacacatttgagatcttttcctgtccactgaaatgcctgagcagtagcagtatttcagtaaacacgacaatgctgagaatatcaccaaattctccagacttgctgaagtgttcctttgggatcctggttcccaaaaagtatggacataggtccctgctggtggccccaggttccaggccatcagtaaggttgggggctgcagactggaccactgcaccgtggagcagaggtgaagaaaccaagacgcagagaggccaagccccttgccttgggtcacacagccaaaggaggcagagccagaactcacaaccagatccagaggcaacagggacatggccacctgggacgaaaaggcagtcacccgcagggccaaggtggctcccgctgagaggatgagcaagttcttaaggcacttcacggtcgtgggagacgactaccatgcctggaacatcaactacaagaaatgggagaatgaagaggaggaggaggaggaggagcagccaccacccacaccagtctcaggcgaggtcatcatcatctgcttggtggttctggatgccctcctggtgcttgctgagctcatcctggacctgaagatcatccagcccgacaagaataactatgctgccatggtattccactacatgagcatcaccatcttggtcttttttatgatggagatcatctttaaattatttgtcttccgcctggagttctttcaccacaagtttgagatcctggatgccgtcgtggtggtggtctcattcatcctcgacattgtcctcctgttccaggagcaccagtttgaggctctgggcctgctgattctgctccggctgtggcgggtggcccggatcatcaatgggattatcatctcagttaagacacgttcagaacggcaactcttaaggttaaaacagatgaatgtacaattggccgccaagattcaacaccttgagttcagctgctctgagaaggaacaagaaattgaaagacttaacaaactattgcgacagcatggacttcttggtgaagtgaactagacccggaccagctcccctcaaaaagaagacactgtctcatgggcctgtgctgtcacgagaggaacagctgcccctcctgggccgcttggtgagaggtttggtttgatacctctgcctccctcctgccagcatggattctgggtggacacagccttgtggaaggtccagtaccaccaagagctgcccatccactcccaccccacactgtatcaaatgtatcacattttctcatgttgaacactttagccttaattgaaaatgagcaacaaagctggacaattgctagttgtatataaaatttaatctcaccgaatgtacagttttcaaatttcacgtgtatattaaggaactgatgcatctgagcattctgaaagaaagaaaaagaagctactttagctgccaccccattctagaaaagtctcttattttcaagctgttctaaatagcttcgtctcagtttccccaaaaggggtacccaggcccctcctctgtgtgccccagctgcatcagccagcttctaggtggctccattgttttctgccacctgacaacatttttcctcaattactgtacaactactgtataaaataaaacaactactgtataaaataaactctctcttttccctggaaaaaaaaaaaaaaaaaa

SEQ ID NO: 1956 - protein, 236 aa, Homo sapien
MATWDEKAVTRRAKVAPAERMSKFLRHFTVVGDDYHAWNINYKKWENEEEEEEEEQPPPTPVSGEVIIICLVVLDALLVLAELILDLKIIQPDKNNYAAMVFHYMSITILVFFMMEIIFKLFVFRLEFFHHKFEILDAVVVVVSFILDIVLLFQEHQFEALGLLILLRLWRVARIINGIIISVKTRSERQLLRLKQMNVQLAAKIQHLEFSCSEKEQEIERLNKLLRQHGLLGEVN

SEQ ID NO: 1957 - DNA, 1816 bp, Homo sapien
cttctctgccagaagataccatttcaactttaacacagcatgatcgaaacatacaaccaaacttctccccgatctgcggccactggactgcccatcagcatgaaaatttttatgtatttacttactgtttttcttatcacccagatgattgggtcagcactttttgctgtgtatcttcatagaaggttggacaagatagaagatgaaaggaatcttcatgaagattttgtattcatgaaaacgatacagagatgcaacacaggagaaagatccttatccttactgaactgtgaggagattaaaagccagtttgaaggctttgtgaaggatataatgttaaacaaagaggagacgaagaaagaaaacagctttgaaatgcaaaaaggtgatcagaatcctcaaattgcggcacatgtcataagtgaggccagcagtaaaacaacatctgtgttacagtgggctgaaaaaggatactacaccatgagcaacaacttggtaaccctggaaaatgggaaacagctgaccgttaaaagacaaggactctattatatctatgcccaagtcaccttctgttccaatcgggaagcttcgagtcaagctccatttatagccagcctctgcctaaagtcccccggtagattcgagagaatcttactcagagctgcaaatacccacagttccgccaaaccttgcgggcaacaatccattcacttgggaggagtatttgaattgcaaccaggtgcttcggtgtttgtcaatgtgactgatccaagccaagtgagccatggcactggcttcacgtcctttggcttactcaaactctgaacagtgtcaccttgcaggctgtggtggagctgacgctgggagtcttcataatacagcacagcggttaagcccaccccctgttaactgcctatttataaccctaggatcctccttatggagaactatttattatacactccaaggcatgtagaactgtaataagtgaattacaggtcacatgaaaccaaaacgggccctgctccataagagcttatatatctgaagcagcaaccccactgatgcagacatccagagagtcctatgaaaagacaaggccattatgcacaggttgaattctgagtaaacagcagataacttgccaagttcagttttgtttctttgcgtgcagtgtctttccatggataatgcatttgatttatcagtgaagatgcagaagggaaatggggagcctcagctcacattcagttatggttgactctgggttcctatggccttgttggagggggccaggctctagaacgtctaacacagtggagaaccgaaacccccccccccccccccgccaccctctcggacagttattcattctctttcaatctctctctctccatctctctctttcagtctctctctctcaacctctttcttccaatctctctttctcaatctctctgtttccctttgtcagtctcttccctcccccagtctctcttctcaatccccctttctaacacacacacacacacacacacacacacacacacacacacacacacacacacacacacacacacagagtcaggccgttgctagtcagttctcttctttccaccctgtccctatctctaccactatagatgagggtgaggagtagggagtgcagccctgagcctgcccactcctcattacgaaatgactgtatttaaaggaaatctattgtatctacctgcagtctccattgtttccagagtgaacttgtaattatcttgttatttattttttgaataataaagacctcttaacattaaaa

SEQ ID NO: 1958 - protein, 261 aa, Homo sapien
MIETYNQTSPRSAATGLPISMKIFMYLLTVFLITQMIGSALFAVYLHRRLDKIEDERNLHEDFVFMKTIQRCNTGERSLSLLNCEEIKSQFEGFVKDIMLNKEETKKENSFEMQKGDQNPQIAAHVISEASSKTTSVLQWAEKGYYTMSNNLVTLENGKQLTVKRQGLYYIYAQVTFCSNREASSQAPFIASLCLKSPGRFERILLRAANTHSSAKPCGQQSIHLGGVFELQPGASVFVNVTDPSQVSHGTGFTSFGLLKL

SEQ ID NO: 1959 - DNA, 1578 bp, Homo sapien
gggctgcaggtttcgacccgcgctggcgagtcatgagcgccaagtttcccactggcgcgcaaacttgagttacttttgagcgtggatactggcgaagaggctgcgggcggtattagcgtttgcagcgacttggctcgggcagctgaccccaaagtgtctgtcttccttcctctgcttgtctctaggctctgaaactgcggcggccaccggacgcttctggagcaggtagcagcatgcagccgcctccaagtctgtgcggacgcgccctggttgcgctggttcttgcctgcggcctgtcgcggatctggggagaggagagaggcttcccgcccgacagggccactccgcttttgcaaaccgcagagataatgacgccacccactaagaccttatggcccaagggttccaacgccagtctggcgcggtcgttggcacctgcggaggtgcctaaaggagacaggacggcaggatctccgccacgcaccatctcccctcccccgtgccaaggacccatcgagatcaaggagactttcaaatacatcaacacggttgtgtcctgccttgtgttcgtgctggggatcatcgggaactccacacttctgagaattatctacaagaacaagtgcatgcgaaacggtcccaatatcttgatcgccagcttggctctgggagacctgctgcacatcgtcattgacatccctatcaatgtctacaagctgctggcagaggactggccatttggagctgagatgtgtaagctggtgcctttcatacagaaagcctccgtgggaatcactgtgctgagtctatgtgctctgagtattgacagatatcgagctgttgcttcttggagtagaattaaaggaattggggttccaaaatggacagcagtagaaattgttttgatttgggtggtctctgtggttctggctgtccctgaagccataggttttgatataattacgatggactacaaaggaagttatctgcgaatctgcttgcttcatcccgttcagaagacagctttcatgcagttttacaagacagcaaaagattggtggctgttcagtttctatttctgcttgccattggccatcactgcatttttttatacactaatgacctgtgaaatgttgagaaagaaaagtggcatgcagattgctttaaatgatcacctaaagcagagacgggaagtggccaaaaccgtcttttgcctggtccttgtctttgccctctgctggcttccccttcacctcagcaggattctgaagctcactctttataatcagaatgatcccaatagatgtgaacttttgagctttctgttggtattggactatattggtatcaacatggcttcactgaattcctgcattaacccaattgctctgtatttggtgagcaaaagattcaaaaactgctttaaggctgggccacatgttggaaataagctagtaatgttgttttctgtcaatattgaatgtgatggtacagtaaaccaaaacccaacaatgtggccagaaagaaagagcaataataattaattcacacaccatatggattctatttataaatcac

SEQ ID NO: 1960 - protein, 436 aa, Homo sapien
MQPPPSLCGRALVALVLACGLSRIWGEERGFPPDRATPLLQTAEIMTPPTKTLWPKGSNASLARSLAPAEVPKGDRTAGSPPRTISPPPCQGPIEIKETFKYINTVVSCLVFVLGIIGNSTLLRIIYKNKCMRNGPNILIASLALGDLLHIVIDIPINVYKLLAEDWPFGAEMCKLVPFIQKASVGITVLSLCALSIDRYRAVASWSRIKGIGVPKWTAVEIVLIWVVSVVLAVPEAIGFDIITMDYKGSYLRICLLHPVQKTAFMQFYKTAKDWWLFSFYFCLPLAITAFFYTLMTCEMLRKKSGMQIALNDHLKQRREVAKTVFCLVLVFALCWLPLHLSRILKLTLYNQNDPNRCELLSFLLVLDYIGINMASLNSCINPIALYLVSKRFKNCFKAGPHVGNKLVMLFSVNIECDGTVNQNPTMWPERKSNNN

SEQ ID NO: 1961 - DNA, 1331 bp, Homo sapien
tcttgctgcgcctccgcctcctcctctgctccgccaccggcttcctcctcctgagcagtcagcccgcgcgccggccggctccgttatggcgacccgcagccctggcgtcgtgattagtgatgatgaaccaggttatgaccttgatttattttgcatacctaatcattatgctgaggatttggaaagggtgtttattcctcatggactaattatggacaggactgaacgtcttgctcgagatgtgatgaaggagatgggaggccatcacattgtagccctctgtgtgctcaaggggggctataaattctttgctgacctgctggattacatcaaagcactgaatagaaatagtgatagatccattcctatgactgtagattttatcagactgaagagctattgtaatgaccagtcaacaggggacataaaagtaattggtggagatgatctctcaactttaactggaaagaatgtcttgattgtggaagatataattgacactggcaaaacaatgcagactttgctttccttggtcaggcagtataatccaaagatggtcaaggtcgcaagcttgctggtgaaaaggaccccacgaagtgttggatataagccagactttgttggatttgaaattccagacaagtttgttgtaggatatgcccttgactataatgaatacttcagggatttgaatcatgtttgtgtcattagtgaaactggaaaagcaaaatacaaagcctaagatgagagttcaagttgagtttggaaacatctggagtcctattgacatcgccagtaaaattatcaatgttctagttctgtggccatctgcttagtagagctttttgcatgtatcttctaagaattttatctgttttgtactttagaaatgtcagttgctgcattcctaaactgtttatttgcactatgagcctatagactatcagttccctttgggcggattgttgtttaacttgtaaatgaaaaaattctcttaaaccacagcactattgagtgaaacattgaactcatatctgtaagaaataaagagaagatatattagttttttaattggtattttaatttttatatatgcaggaaagaatagaagtgattgaatattgttaattataccaccgtgtgttagaaaagtaagaagcagtcaattttcacatcaaagacagcatctaagaagttttgttctgtcctggaattattttagtagtgtttcagtaatgttgactgtattttccaacttgttcaaattattaccagtgaatctttgtcagcagttcccttttaaatgcaaatcaataaattcccaaaaattt

SEQ ID NO: 1962 - protein, 218 aa, Homo sapien
MATRSPGVVISDDEPGYDLDLFCIPNHYAEDLERVFIPHGLIMDRTERLARDVMKEMGGHHIVALCVLKGGYKFFADLLDYIKALNRNSDRSIPMTVDFIRLKSYCNDQSTGDIKVIGGDDLSTLTGKNVLIVEDIIDTGKTMQTLLSLVRQYNPKMVKVASLLVKRTPRSVGYKPDFVGFEIPDKFVVGYALDYNEYFRDLNHVCVISETGKAKYKA

SEQ ID NO: 1963 - DNA, 5084 bp, Homo sapien
gatcccatcgcagctaccgcgatgagaggcgctcgcggcgcctgggattttctctgcgttctgctcctactgcttcgcgtccagacaggctcttctcaaccatctgtgagtccaggggaaccgtctccaccatccatccatccaggaaaatcagacttaatagtccgcgtgggcgacgagattaggctgttatgcactgatccgggctttgtcaaatggacttttgagatcctggatgaaacgaatgagaataagcagaatgaatggatcacggaaaaggcagaagccaccaacaccggcaaatacacgtgcaccaacaaacacggcttaagcaattccatttatgtgtttgttagagatcctgccaagcttttccttgttgaccgctccttgtatgggaaagaagacaacgacacgctggtccgctgtcctctcacagacccagaagtgaccaattattccctcaaggggtgccaggggaagcctcttcccaaggacttgaggtttattcctgaccccaaggcgggcatcatgatcaaaagtgtgaaacgcgcctaccatcggctctgtctgcattgttctgtggaccaggagggcaagtcagtgctgtcggaaaaattcatcctgaaagtgaggccagccttcaaagctgtgcctgttgtgtctgtgtccaaagcaagctatcttcttagggaaggggaagaattcacagtgacgtgcacaataaaagatgtgtctagttctgtgtactcaacgtggaaaagagaaaacagtcagactaaactacaggagaaatataatagctggcatcacggtgacttcaattatgaacgtcaggcaacgttgactatcagttcagcgagagttaatgattctggagtgttcatgtgttatgccaataatacttttggatcagcaaatgtcacaacaaccttggaagtagtagataaaggattcattaatatcttccccatgataaacactacagtatttgtaaacgatggagaaaatgtagatttgattgttgaatatgaagcattccccaaacctgaacaccagcagtggatctatatgaacagaaccttcactgataaatgggaagattatcccaagtctgagaatgaaagtaatatcagatacgtaagtgaacttcatctaacgagattaaaaggcaccgaaggaggcacttacacattcctagtgtccaattctgacgtcaatgctgccatagcatttaatgtttatgtgaatacaaaaccagaaatcctgacttacgacaggctcgtgaatggcatgctccaatgtgtggcagcaggattcccagagcccacaatagattggtatttttgtccaggaactgagcagagatgctctgcttctgtactgccagtggatgtgcagacactaaactcatctgggccaccgtttggaaagctagtggttcagagttctatagattctagtgcattcaagcacaatggcacggttgaatgtaaggcttacaacgatgtgggcaagacttctgcctattttaactttgcatttaaaggtaacaacaaagagcaaatccatccccacaccctgttcactcctttgctgattggtttcgtaatcgtagctggcatgatgtgcattattgtgatgattctgacctacaaatatttacagaaacccatgtatgaagtacagtggaaggttgttgaggagataaatggaaacaattatgtttacatagacccaacacaacttccttatgatcacaaatgggagtttcccagaaacaggctgagttttgggaaaaccctgggtgctggagctttcgggaaggttgttgaggcaactgcttatggcttaattaagtcagatgcggccatgactgtcgctgtaaagatgctcaagccgagtgcccatttgacagaacgggaagccctcatgtctgaactcaaagtcctgagttaccttggtaatcacatgaatattgtgaatctacttggagcctgcaccattggagggcccaccctggtcattacagaatattgttgctatggtgatcttttgaattttttgagaagaaaacgtgattcatttatttgttcaaagcaggaagatcatgcagaagctgcactttataagaatcttctgcattcaaaggagtcttcctgcagcgatagtactaatgagtacatggacatgaaacctggagtttcttatgttgtcccaaccaaggccgacaaaaggagatctgtgagaataggctcatacatagaaagagatgtgactcccgccatcatggaggatgacgagttggccctagacttagaagacttgctgagcttttcttaccaggtggcaaagggcatggctttcctcgcctccaagaattgtattcacagagacttggcagccagaaatatcctccttactcatggtcggatcacaaagatttgtgattttggtctagccagagacatcaagaatgattctaattatgtggttaaaggaaacgctcgactacctgtgaagtggatggcacctgaaagcattttcaactgtgtatacacgtttgaaagtgacgtctggtcctatgggatttttctttgggagctgttctctttaggaagcagcccctatcctggaatgccggtcgattctaagttctacaagatgatcaaggaaggcttccggatgctcagccctgaacacgcacctgctgaaatgtatgacataatgaagacttgctgggatgcagatcccctaaaaagaccaacattcaagcaaattgttcagctaattgagaagcagatttcagagagcaccaatcatatttactccaacttagcaaactgcagccccaaccgacagaagcccgtggtagaccattctgtgcggatcaattctgtcggcagcaccgcttcctcctcccagcctctgcttgtgcacgacgatgtctgagcagaatcagtgtttgggtcacccctccaggaatgatctcttcttttggcttccatgatggttattttcttttctttcaacttgcatccaactccaggatagtgggcaccccactgcaatcctgtctttctgagcacactttagtggccgatgatttttgtcatcagccaccatcctattgcaaaggttccaactgtatatattcccaatagcaacgtagcttctaccatgaacagaaaacattctgatttggaaaaagagagggaggtatggactgggggccagagtcctttccaaggcttctccaattctgcccaaaaatatggttgatagtttacctgaataaatggtagtaatcacagttggccttcagaaccatccatagtagtatgatgatacaagattagaagctgaaaacctaagtcctttatgtggaaaacagaacatcattagaacaaaggacagagtatgaacacctgggcttaagaaatctagtatttcatgctgggaatgagacataggccatgaaaaaaatgatccccaagtgtgaacaaaagatgctcttctgtggaccactgcatgagcttttatactaccgacctggtttttaaatagagtttgctattagagcattgaattggagagaaggcctccctagccagcacttgtatatacgcatctataaattgtccgtgttcatacatttgaggggaaaacaccataaggtttcgtttctgtatacaaccctggcattatgtccactgtgtatagaagtagattaagagccatataagtttgaaggaaacagttaataccattttttaaggaaacaatataaccacaaagcacagtttgaacaaaatctcctcttttagctgatgaacttattctgtagattctgtggaacaagcctatcagcttcagaatggcattgtactcaatggatttgatgctgtttgacaaagttactgattcactgcatggctcccacaggagtgggaaaacactgccatcttagtttggattcttatgtagcaggaaataaagtataggtttagcctccttcgcaggcatgtcctggacaccgggccagtatctatatatgtgtatgtacgtttgtatgtgtgtagacaaatatttggaggggtatttttgccctgagtccaagagggtcctttagtacctgaaaagtaacttggctttcattattagtactgctcttgtttcttttcacatagctgtctagagtagcttaccagaagcttccatagtggtgcagaggaagtggaaggcatcagtccctatgtatttgcagttcacctgcacttaaggcactctgttatttagactcatcttactgtacctgttccttagaccttccataatgctactgtctcactgaaacatttaaattttaccctttagactgtagcctggatattattcttgtagtttacctctttaaaaacaaaacaaaacaaaacaaaaaactccccttcctcactgcccaatataaaaggcaaatgtgtacatggcagagtttgtgtgttgtcttgaaagattcaggtatgttgcctttatggtttcccccttctacatttcttagactacatttagagaactgtggccgttatctggaagtaaccatttgcactggagttctatgctctcgcacctttccaaagttaacagattttggggttgtgttgtcacccaagagattgttgtttgccatactttgtctgaaaaattcctttgtgtttctattgacttcaatgatagtaagaaaagtggttgttagttatagatgtctaggtacttcaggggcacttcattgagagttttgtcttgccatactttgtctgaaaaattcctttgtgtttctattgacttcaatgatagtaagaaaagtggttgttagttatagatgtctaggtacttcaggggcacttcattgagagttttgtcaatgtcttttgaatattcccaagcccatgagtccttgaaaatattttttatatatacagtaactttatgtgtaaatacataagcggcgtaagtttaaaggatgttggtgttccacgtgttttattcctgtatgttgtccaattgttgacagttctgaagaattc

SEQ ID NO: 1964 - protein, 976 aa, Homo sapien [sequence omitted]

SEQ ID NO: 1965 - DNA, 2732 bp, Homo sapien
aacaacatcctgggattgggacccactttctgggcactgctggccagtcccaaaatggaacataaggaagtggttcttctacttcttttatttctgaaatcaggtcaaggagagcctctggatgactatgtgaatacccagggggcttcactgttcagtgtcactaagaagcagctgggagcaggaagtatagaagaatgtgcagcaaaatgtgaggaggacgaagaattcacctgcagggcattccaatatcacagtaaagagcaacaatgtgtgataatggctgaaaacaggaagtcctccataatcattaggatgagagatgtagttttatttgaaaagaaagtgtatctctcagagtgcaagactgggaatggaaagaactacagagggacgatgtccaaaacaaaaaatggcatcacctgtcaaaaatggagttccacttctccccacagacctagattctcacctgctacacacccctcagagggactggaggagaactactgcaggaatccagacaacgatccgcaggggccctggtgctatactactgatccagaaaagagatatgactactgcgacattcttgagtgtgaagaggaatgtatgcattgcagtggagaaaactatgacggcaaaatttccaagaccatgtctggactggaatgccaggcctgggactctcagagcccacacgctcatggatacattccttccaaatttccaaacaagaacctgaagaagaattactgtcgtaaccccgatagggagctgcggccttggtgtttcaccaccgaccccaacaagcgctgggaactttgcgacatcccccgctgcacaacacctccaccatcttctggtcccacctaccagtgtctgaagggaacaggtgaaaactatcgcgggaatgtggctgttaccgtttccgggcacacctgtcagcactggagtgcacagacccctcacacacataacaggacaccagaaaacttcccctgcaaaaatttggatgaaaactactgccgcaatcctgacggaaaaagggccccatggtgccatacaaccaacagccaagtgcggtgggagtactgtaagataccgtcctgtgactcctccccagtatccacggaacaattggctcccacagcaccacctgagctaacccctgtggtccaggactgctaccatggtgatggacagagctaccgaggcacatcctccaccaccaccacaggaaagaagtgtcagtcttggtcatctatgacaccacaccggcaccagaagaccccagaaaactacccaaatgctggcctgacaatgaactactgcaggaatccagatgccgataaaggcccctggtgttttaccacagaccccagcgtcaggtgggagtactgcaacctgaaaaaatgctcaggaacagaagcgagtgttgtagcacctccgcctgttgtcctgcttccagatgtagagactccttccgaagaagactgtatgtttgggaatgggaaaggataccgaggcaagagggcgaccactgttactgggacgccatgccaggactgggctgcccaggagccccatagacacagcattttcactccagagacaaatccacgggcgggtctggaaaaaaattactgccgtaaccctgatggtgatgtaggtggtccctggtgctacacgacaaatccaagaaaactttacgactactgtgatgtccctcagtgtgcggccccttcatttgattgtgggaagcctcaagtggagccgaagaaatgtcctggaagggttgtgggggggtgtgtggcccacccacattcctggccctggcaagtcagtcttagaacaaggtttggaatgcacttctgtggaggcaccttgatatccccagagtgggtgttgactgctgcccactgcttggagaagtccccaaggccttcatcctacaaggtcatcctgggtgcacaccaagaagtgaatctcgaaccgcatgttcaggaaatagaagtgtctaggctgttcttggagcccacacgaaaagatattgccttgctaaagctaagcagtcctgccgtcatcactgacaaagtaatcccagcttgtctgccatccccaaattatgtggtcgctgaccggaccgaatgtttcatcactggctggggagaaacccaaggtacttttggagctggccttctcaaggaagcccagctccctgtgattgagaataaagtgtgcaatcgctatgagtttctgaatggaagagtccaatccaccgaactctgtgctgggcatttggccggaggcactgacagttgccagggtgacagtggaggtcctctggtttgcttcgagaaggacaaatacattttacaaggagtcacttcttggggtcttggctgtgcacgccccaataagcctggtgtctatgttcgtgtttcaaggtttgttacttggattgagggagtgatgagaaataattaattggacgggagacagagtgacgcactgactcacctagaggctgggacgtgggtagggatttagcatgctggaaataactggcagtaatcaaacgaagacactgtccccagctaccagctacgccaaacctcggcattttttgtgttattttctgactgctggattctgtagtaaggtgacatagctatgacatttgttaaaaataaactctgtacttaactttgatttgagtaaattttggtttt

SEQ ID NO: 1966 - protein, 810 aa, Homo sapien
MEHKEVVLLLLLFLKSGQGEPLDDYVNTQGASLFSVTKKQLGAGSIEECAAKCEEDEEFTCRAFQYHSKEQQCVIMAENRKSSIIIRMRDVVLFEKKVYLSECKTGNGKNYRGTMSKTKNGITCQKWSSTSPHRPRFSPATHPSEGLEENYCRNPDNDPQGPWCYTTDPEKRYDYCDILECEEECMHCSGENYDGKISKTMSGLECQAWDSQSPHAHGYIPSKFPNKNLKKNYCRNPDRELRPWCFTTDPNKRWELCDIPRCTTPPPSSGPTYQCLKGTGENYRGNVAVTVSGHTCQHWSAQTPHTHNRTPENFPCKNLDENYCRNPDGKRAPWCHTTNSQVRWEYCKIPSCDSSPVSTEQLAPTAPPELTPVVQDCYHGDGQSYRGTSSTTTTGKKCQSWSSMTPHRHQKTPENYPNAGLTMNYCRNPDADKGPWCFTTDPSVRWEYCNLKKCSGTEASVVAPPPVVLLPDVETPSEEDCMFGNGKGYRGKRATTVTGTPCQDWAAQEPHRHSIFTPETNPRAGLEKNYCRNPDGDVGGPWCYTTNPRKLYDYCDVPQCAAPSFDCGKPQVEPKKCPGRVVGGCVAHPHSWPWQVSLRTRFGMHFCGGTLISPEWVLTAAHCLEKSPRPSSYKVILGAHQEVNLEPHVQEIEVSRLFLEPTRKDIALLKLSSPAVITDKVIPACLPSPNYVVADRTECFITGWGETQGTFGAGLLKEAQLPVIENKVCNRYEFLNGRVQSTELCAGHLAGGTDSCQGDSGGPLVCFEKDKYILQGVTSWGLGCARPNKPGVYVRVSRFVTWIEGVMRNN

SEQ ID NO: 1967 - DNA, 2415 bp, Homo sapien
cggcgccgcgagcttctcctctcctcacgaccgaggcagagcagtcattatggcgaaccttggctgctggatgctggttctctttgtggccacatggagtgacctgggcctctgcaagaagcgcccgaagcctggaggatggaacactgggggcagccgatacccggggcagggcagccctggaggcaaccgctacccacctcagggcggtggtggctgggggcagcctcatggtggtggctgggggcagcctcatggtggtggctgggggcagccccatggtggtggctggggacagcctcatggtggtggctggggtcaaggaggtggcacccacagtcagtggaacaagccgagtaagccaaaaaccaacatgaagcacatggctggtgctgcagcagctggggcagtggtggggggccttggcggctacatgctgggaagtgccatgagcaggcccatcatacatttcggcagtgactatgaggaccgttactatcgtgaaaacatgcaccgttaccccaaccaagtgtactacaggcccatggatgagtacagcaaccagaacaactttgtgcacgactgcgtcaatatcacaatcaagcagcacacggtcaccacaaccaccaagggggagaacttcaccgagaccgacgttaagatgatggagcgcgtggttgagcagatgtgtatcacccagtacgagagggaatctcaggcctattaccagagaggatcgagcatggtcctcttctcctctccacctgtgatcctcctgatctctttcctcatcttcctgatagtgggatgaggaaggtcttcctgttttcaccatctttctaatctttttccagcttgagggaggcggtatccacctgcagcccttttagtggtggtgtctcactctttcttctctctttgtcccggataggctaatcaatacccttggcactgatgggcactggaaaacatagagtagacctgagatgctggtcaagccccctttgattgagttcatcatgagccgttgctaatgccaggccagtaaaagtataacagcaaataaccattggttaatctggacttatttttggacttagtgcaacaggttgaggctaaaacaaatctcagaacagtctgaaatacctttgcctggatacctctggctccttcagcagctagagctcagtatactaatgccctatcttagtagagatttcatagctatttagagatattttccattttaagaaaacccgacaacatttctgccaggtttgttaggaggccacatgatacttattcaaaaaaatcctagagattcttagctcttgggatgcaggctcagcccgctggagcatgagctctgtgtgtaccgagaactggggtgatgttttacttttcacagtatgggctacacagcagctgttcaacaagagtaaatattgtcacaacactgaacctctggctagaggacatattcacagtgaacataactgtaacatatatgaaaggcttctgggacttgaaatcaaatgtttgggaatggtgcccttggaggcaacctcccattttagatgtttaaaggaccctatatgtggcattcctttctttaaactataggtaattaaggcagctgaaaagtaaattgccttctagacactgaaggcaaatctcctttgtccatttacctggaaaccagaatgattttgacatacaggagagctgcagttgtgaaagcaccatcatcatagaggatgatgtaattaaaaaatggtcagtgtgcaaagaaaagaactgcttgcatttctttatttctgtctcataattgtcaaaaaccagaattaggtcaagttcatagtttctgtaattggcttttgaatcaaagaatagggagacaatctaaaaaatatcttaggttggagatgacagaaatatgattgatttgaagtggaaaaagaaattctgttaatgttaattaaagtaaaattattccctgaattgtttgatattgtcacctagcagatatgtattacttttctgcaatgttattattggcttgcactttgtgagtatctatgtaaaaatatatatgtatataaaatatatattgcataggacagacttaggagttttgtttagagcagttaacatctgaagtgtctaatgcattaacttttgtaaggtactgaatacttaatatgtgggaaacccttttgcgtggtccttaggcttacaatgtgcactgaatcgtttcatgtaagaatccaaagtggacaccattaacaggtctttgaaatatgcatgtactttatattttctatatttgtaactttgcatgttcttgttttgttatataaaaaaattgtaaatgtttaatatctgactgaaattaaacgagcgaagatgagcacc

SEQ ID NO: 1968 - protein, 253 aa, Homo sapien
MANLGCWMLVLFVATWSDLGLCKKRPKPGGWNTGGSRYPGQGSPGGNRYPPQGGGGWGQPHGGGWGQPHGGGWGQPHGGGWGQPHGGGWGQGGGTHSQWNKPSKPKTNMKHMAGAAAAGAVVGGLGGYMLGSAMSRPIIHFGSDYEDRYYRENMHRYPNQVYYRPMDEYSNQNNFVHDCVNITIKQHTVTTTTKGENFTETDVKMMERVVEQMCITQYERESQAYYQRGSSMVLFSSPPVILLISFLIFLIVG

SEQ ID NO: 1969 - DNA, 2547 bp, Homo sapien
ccacgcgtccgcggacgcgtgggcgagaagtgcttccaagcgtccattttgagccttggaaactacgacgaccaaagggccacgggttcctgggtcgtttctcatttccgtcgagttaaacgtctggggctgcttctgaggaatcagcttggctggccagcaagttcagctccggcaagtcatttgattcacccggtgatgaaatgggggtcaaccagtctgtgggctttccacctgtcacaggaccccacctcgtaggctgtggggatgtgatggagggtcagaatctccaggggagcttctttcgactcttctacccctgccaaaaggcagaggagaccatggagcagcccctgtggattccccgctatgagtactgcactggcctggccgagtacctgcagtttaataagcgctgcgggggcttgctgttcaacctggcggtgggatcttgtcgcctgcctgttagctggaatggcccctttaagacaaaggactctggataccccttgatcatcttctcccatggcctaggagccttcaggactttgtattcagccttctgcatggagctggcctcacgtggctttgtggttgctgtgccagagcacagggaccggtcagcggcaaccacctatttctgcaagcaggccccagaagagaaccagcccaccaatgaatcgctgcaggaggaatggatccctttccgtcgagttgaggaaggggagaaggaatttcatgttcggaatccccaggtgcatcagcgggtaagcgagtgtttacgggtgttgaagatcctgcaagaggtcactgctgggcagactgtcttcaacatcttgcctggtggcttggatctgatgactttgaagggcaacattgacatgagccgtgtggctgtgatgggacattcatttggaggggccacagctattctggctttggccaaggagacccaatttcggtgtgcggtggctctggatgcttggatgtttcctctggaacgtgacttttaccccaaggcccgaggacctgtgttctttatcaatactgagaaattccagacaatggagagtgtcaatttgatgaagaagatatgtgcccagcatgaacagtctaggatcataaccgttcttggttctgttcatcggagtcaaactgactttgcttttgtgactggcaacttgattggtaaattcttctccactgaaacccgtgggagcctggacccctatgaagggcaggaggttatggtacgggccatgttggccttcctgcagaagcacctcgacctgaaagaagactataatcaatggaacaaccttattgaaggcattggaccgtcgctcaccccaggggccccccaccatctgtccagcctgtaggcacaactggccatttgtaaagtcacttcagccaagttttcatttgggagctacccaagggcacccatgagctcctatcaagaagtgatcaacgtgaccccttttcacagattgaaaggtgtaatcacactgctgcttggataactgggtactttgatcttagatttgatcttaaaatcactttgggactgggatcccttgctgattgacaaacagactttctgggaccttgatggagtggggaacaagcagtagagtgggactgggggagacccaggccccgggctgagcactgtgaggcctggatgtgaagactcagcccagcgaagctcattcccttacccccggccagtgctgctgcttcagtggaagagatgaagccaaaggacagaatgaaaatccctaccttcagagactctagcccagcccaacaccatctcttcctacctctcagccttctccctccccagggccacttgttgaagtctgagcactttatgtaaatttctaggtgtgagccgtgatcacattttctatttatttccaagtcttctcattgtatggaacatagtactacttatacttacagtagtaagttatacttgtgagcccacagagtggcagacagcatggctctcacagcacagggagaaaaactgaggtacacagaggtacctcagaagctctggatgtctttgggggttttgctaagtgtatcttgataggaaacaacaaaagcaggttgagatggggaagatgacagaacaacagtgttaaatggccatttgcacaggcctttgccacaacagagaagtagtttggtcagctaaaactcagctgcagcctggacagtagagcgagaccccatcttaaaaataaagaaggctgggcgtggtggctcatgcctgtaatcccagcactttgggaggccaaggcaggcagatcacttaaggccaggagttcaagaccacctggccaacatggtgaaaccccgtctctactaaaaatacaaaaaattagcctggcgtaatggcaggcgcctataatcccagctactcaggaggctgaagcagaagaatcacttgaacctaggaggcggaggttgcagtgagtcaagatcgcgccactgcactccagcctgggtgacagagcaagactctgtctt

SEQ ID NO: 1970 - protein, 392 aa, Homo sapien
MGVNQSVGFPPVTGPHLVGCGDVMEGQNLQGSFFRLFYPCQKAEETMEQPLWIPRYEYCTGLAEYLQFNKRCGGLLFNLAVGSCRLPVSWNGPFKTKDSGYPLIIFSHGLGAFRTLYSAFCMELASRGFVVAVPEHRDRSAATTYFCKQAPEENQPTNESLQEEWIPFRRVEEGEKEFHVRNPQVHQRVSECLRVLKILQEVTAGQTVFNILPGGLDLMTLKGNIDMSRVAVMGHSFGGATAILALAKETQFRCAVALDAWMFPLERDFYPKARGPVFFINTEKFQTMESVNLMKKICAQHEQSRIITVLGSVHRSQTDFAFVTGNLIGKFFSTETRGSLDPYEGQEVMVRAMLAFLQKHLDLKEDYNQWNNLIEGIGPSLTPGAPHHLSSL

SEQ ID NO: 1971 - DNA, 3189 bp, Homo sapien
tttccagccatggctgccattacctgaccagcgccacagccggtctctctgcaggcgccgggagaagtgaccagagcaatttctgcttttcacagggcgggtttctcaacggtgacttgtgggcagtgccttctgctgagcgagtcatggcccgaaggcagaactaactgtgcctgcagtcttcactctcaggatgcagccgaggtgggcccaaggggccacgatgtggcttggagtcctgctgacccttctgctctgttcaagccttgagggtcaagaaaactctttcacaatcaacagtgttgacatgaagagcctgccggactggacggtgcaaaatgggaagaacctgaccctgcagtgcttcgcggatgtcagcaccacctctcacgtcaagcctcagcaccagatgctgttctataaggatgacgtgctgttttacaacatctcctccatgaagagcacagagagttattttattcctgaagtccggatctatgactcagggacatataaatgtactgtgattgtgaacaacaaagagaaaaccactgcagagtaccaggtgttggtggaaggagtgcccagtcccagggtgacactggacaagaaagaggccatccaaggtgggatcgtgagggtcaactgttctgtcccagaggaaaaggccccaatacacttcacaattgaaaaacttgaactaaatgaaaaaatggtcaagctgaaaagagagaagaattctcgagaccagaattttgtgatactggaattccccgttgaggaacaggaccgcgttttatccttccgatgtcaagctaggatcatttctgggatccatatgcagacctcagaatctaccaagagtgaactggtcaccgtgacggaatccttctctacacccaagttccacatcagccccaccggaatgatcatggaaggagctcagctccacattaagtgcaccattcaagtgactcacctggcccaggagtttccagaaatcataattcagaaggacaaggcgattgtggcccacaacagacatggcaacaaggctgtgtactcagtcatggccatggtggagcacagtggcaactacacgtgcaaagtggagtccagccgcatatccaaggtcagcagcatcgtggtcaacataacagaactattttccaagcccgaactggaatcttccttcacacatctggaccaaggtgaaagactgaacctgtcctgctccatcccaggagcacctccagccaacttcaccatccagaaggaagatacgattgtgtcacagactcaagatttcaccaagatagcctcaaagtcggacagtgggacgtatatctgcactgcaggtattgacaaagtggtcaagaaaagcaacacagtccagatagtcgtatgtgaaatgctctcccagcccaggatttcttatgatgcccagtttgaggtcataaaaggacagaccatcgaagtccgttgcgaatcgatcagtggaactttgcctatttcttaccaacttttaaaaacaagtaaagttttggagaatagtaccaagaactcaaatgatcctgcggtattcaaagacaaccccactgaagacgtcgaataccagtgtgttgcagataattgccattcccacgccaaaatgttaagtgaggttctgagggtgaaggtgatagccccggtggatgaggtccagatttctatcctgtcaagtaaggtggtggagtctggagaggacattgtgctgcaatgtgctgtgaatgaaggatctggtcccatcacctataagttttacagagaaaaagagggcaaacccttctatcaaatgacctcaaatgccacccaggcattttggaccaagcagaaggctaacaaggaacaggagggagagtattactgcacagccttcaacagagccaaccacgcctccagtgtccccagaagcaaaatactgacagtcagagtcattcttgccccatggaagaaaggacttattgcagtggttatcatcggagtgatcattgctctcttgatcattgcggccaaatgttattttctgaggaaagccaaggccaagcagatgccagtggaaatgtccaggccagcagtaccacttctgaactccaacaacgagaaaatgtcagatcccaatatggaagctaacagtcattacggtcacaatgacgatgtcggaaaccatgcaatgaaaccaataaatgataataaagagcctctgaactcagacgtgcagtacacggaagttcaagtgtcctcagctgagtctcacaaagatctaggaaagaaggacacagagacagtgtacagtgaagtccggaaagctgtccctgatgccgtggaaagcagatactctagaacggaaggctcccttgatggaacttagacagcaaggccagatgcacatccctggaaggacatccatgttccgagaagaacagatgatccctgtatttcaagacctctgtgcacttatttatgaacctgccctgctcccacagaacacagcaattcctcaggctaagctgccggttcttaaatccatcctgctaagttaatgttgggtagaaagagatacagaggggctgttgaatttcccacatacactccttccaccaagttggaacatccttggaaattggaagagcacaagaggagatccagggcaaggccattgggatattctgaaacttgaatattttgttttgtgcagagataaagaccttttccatgcaccctcatacacagaaaccaattttcttttttatactcaatcatttctagcgcatggcctggttagaggctggttttttctcttttcctttggtccttcaaaggcttgtagttttgggtagtccttgttctttggaaatacacagtgctgaccagacagcctccccctgtcccctctatgacctcgccctccacaaatgggaaaaccagactacttgggagcaccgcctgtgaaataccaacctgaagacacggttcattcaggcaacgcacaaaacagaaaatgaaggtggaacaagcacagatgttcttcaactgtttttgtctacactctttctcttttcctctaccatgctgaaggctgaaagacaggaagatggtgccatcagcaaatattattcttaattgaaaacttgaaaaaaaaaaaaaaaa

SEQ ID NO: 1972 - protein, 738 aa, Homo sapien
MQPRWAQGATMWLGVLLTLLLCSSLEGQENSFTINSVDMKSLPDWTVQNGKNLTLQCFADVSTTSHVKPQHQMLFYKDDVLFYNISSMKSTESYFIPEVRIYDSGTYKCTVIVNNKEKTTAEYQVLVEGVPSPRVTLDKKEAIQGGIVRVNCSVPEEKAPIHFTIEKLELNEKMVKLKREKNSRDQNFVILEFPVEEQDRVLSFRCQARIISGIHMQTSESTKSELVTVTESFSTPKFHISPTGMIMEGAQLHIKCTIQVTHLAQEFPEIIIQKDKAIVAHNRHGNKAVYSVMAMVEHSGNYTCKVESSRISKVSSIVVNITELFSKPELESSFTHLDQGERLNLSCSIPGAPPANFTIQKEDTIVSQTQDFTKIASKSDSGTYICTAGIDKVVKKSNTVQIVVCEMLSQPRISYDAQFEVIKGQTIEVRCESISGTLPISYQLLKTSKVLENSTKNSNDPAVFKDNPTEDVEYQCVADNCHSHAKMLSEVLRVKVIAPVDEVQISILSSKVVESGEDIVLQCAVNEGSGPITYKFYREKEGKPFYQMTSNATQAFWTKQKANKEQEGEYYCTAFNRANHASSVPRSKILTVRVILAPWKKGLIAVVIIGVIIALLIIAAKCYFLRKAKAKQMPVEMSRPAVPLLNSNNEKMSDPNMEANSHYGHNDDVGNHAMKPINDNKEPLNSDVQYTEVQVSSAESHKDLGKKDTETVYSEVRKAVPDAVESRYSRTEGSLDGT

SEQ ID NO: 1973 - DNA, 2215 bp, Homo sapien
agcttttctcttctgtcaaccccacacgcctttggcacaatgaagtgggtaacctttatttcccttctttttctctttagctcggcttattccaggggtgtgtttcgtcgagatgcacacaagagtgaggttgctcatcggtttaaagatttgggagaagaaaatttcaaagccttggtgttgattgcctttgctcagtatcttcagcagtgtccatttgaagatcatgtaaaattagtgaatgaagtaactgaatttgcaaaaacatgtgttgctgatgagtcagctgaaaattgtgacaaatcacttcataccctttttggagacaaattatgcacagttgcaactcttcgtgaaacctatggtgaaatggctgactgctgtgcaaaacaagaacctgagagaaatgaatgcttcttgcaacacaaagatgacaacccaaacctcccccgattggtgagaccagaggttgatgtgatgtgcactgcttttcatgacaatgaagagacatttttgaaaaaatacttatatgaaattgccagaagacatccttacttttatgccccggaactccttttctttgctaaaaggtataaagctgcttttacagaatgttgccaagctgctgataaagctgcctgcctgttgccaaagctcgatgaacttcgggatgaagggaaggcttcgtctgccaaacagagactcaagtgtgccagtctccaaaaatttggagaaagagctttcaaagcatgggcagtagctcgcctgagccagagatttcccaaagctgagtttgcagaagtttccaagttagtgacagatcttaccaaagtccacacggaatgctgccatggagatctgcttgaatgtgctgatgacagggcggaccttgccaagtatatctgtgaaaatcaagattcgatctccagtaaactgaaggaatgctgtgaaaaacctctgttggaaaaatcccactgcattgccgaagtggaaaatgatgagatgcctgctgacttgccttcattagctgctgattttgttgaaagtaaggatgtttgcaaaaactatgctgaggcaaaggatgtcttcctgggcatgtttttgtatgaatatgcaagaaggcatcctgattactctgtcgtgctgctgctgagacttgccaagacatatgaaaccactctagagaagtgctgtgccgctgcagatcctcatgaatgctatgccaaagtgttcgatgaatttaaacctcttgtggaagagcctcagaatttaatcaaacaaaattgtgagctttttgagcagcttggagagtacaaattccagaatgcgctattagttcgttacaccaagaaagtaccccaagtgtcaactccaactcttgtagaggtctcaagaaacctaggaaaagtgggcagcaaatgttgtaaacatcctgaagcaaaaagaatgccctgtgcagaagactatctatccgtggtcctgaaccagttatgtgtgttgcatgagaaaacgccagtaagtgacagagtcaccaaatgctgcacagaatccttggtgaacaggcgaccatgcttttcagctctggaagtcgatgaaacatacgttcccaaagagtttaatgctgaaacattcaccttccatgcagatatatgcacactttctgagaaggagagacaaatcaagaaacaaactgcacttgttgagctcgtgaaacacaagcccaaggcaacaaaagagcaactgaaagctgttatggatgatttcgcagcttttgtagagaagtgctgcaaggctgacgataaggagacctgctttgccgaggagggtaaaaaacttgttgctgcaagtcaagctgccttaggcttataacatctacatttaaaagcatctcagcctaccatgagaataagagaaagaaaatgaagatcaaaagcttattcatctgttttctttttcgttggtgtaaagccaacaccctgtctaaaaaacataaatttctttaatcattttgcctcttttctctgtgcttcaattaataaaaaatggaaagaatctaatagagtggtacagcactgttatttttcaaagatgtgttgctatcctgaaaattctgtaggttctgtggaagttccagtgttctctcttattccacttcggtagaggatttctagtttctgtgggctaattaaataaatcactaatactcttctaagtt

SEQ ID NO: 1974 - protein, 609 aa, Homo sapien [sequence omitted]

SEQ ID NO: 1975 - DNA, 2958 bp, Homo sapien
ggcacgagggtgtgcgtgatggagaaaattgggcaccagggctgctcccgagattctcagatctgatttccacgcttgctaccaaaatagtctgggcaggccacttttggaagtaggcgttatctagtgagcaggcggccgctttcgatttcgctttcccctaaatggctgagcttctcgccagcgcaggatcagcctgttcctgggactttccgagagccccgccctcgttccctcccccagccgccagtaggggaggactcggcggtacccggagcttcaggccccaccggggcgcggagagtcccagacccggccgggaccgggacggcgtccgagtgccaatggctagctctaggtgtcccgctccccgcgggtgccgctgcctccccggagcttctctcgcatggctggggacagtactgctacttctcgccgactgggtgctgctccggaccgcgctgccccgcatattctccctgctggtgcccaccgcgctgccactgctccgggtctgggcggtgggcctgagccgctgggccgtgctctggctgggggcctgcggggtcctcagggcaacggttggctccaagagcgaaaacgcaggtgcccagggctggctggctgctttgaagccattagctgcggcactgggcttggccctgccgggacttgccttgttccgagagctgatctcatggggagcccccgggtccgcggatagcaccaggctactgcactggggaagtcaccctaccgccttcgttgtcagttatgcagcggcactgcccgcagcagccctgtggcacaaactcgggagcctctgggtgcccggcggtcagggcggctctggaaaccctgtgcgtcggcttctaggctgcctgggctcggagacgcgccgcctctcgctgttcctggtcctggtggtcctctcctctcttggggagatggccattccattctttacgggccgcctcactgactggattctacaagatggctcagccgataccttcactcgaaacttaactctcatgtccattctcaccatagccagtgcagtgctggagttcgtgggtgacgggatctataacaacaccatgggccacgtgcacagccacttgcagggagaggtgtttggggctgtcctgcgccaggagacggagtttttccaacagaaccagacaggtaacatcatgtctcgggtaacagaggacacgtccaccctgagtgattctctgagtgagaatctgagcttatttctgtggtacctggtgcgaggcctatgtctcttggggatcatgctctggggatcagtgtccctcaccatggtcaccctgatcaccctgcctctgcttttccttctgcccaagaaggtgggaaaatggtaccagttgctggaagtgcaggtgcgggaatctctggcaaagtccagccaggtggccattgaggctctgtcggccatgcctacagttcgaagctttgccaacgaggagggcgaagcccagaagtttagggaaaagctgcaagaaataaagacactcaaccagaaggaggctgtggcctatgcagtcaactcctggaccactagtatttcaggtatgctgctgaaagtgggaatcctctacattggtgggcagctggtgaccagtggggctgtaagcagtgggaaccttgtcacatttgttctctaccagatgcagttcacccaggctgtggaggtactgctctccatctaccccagagtacagaaggctgtgggctcctcagagaaaatatttgagtacctggaccgcacccctcgctgcccacccagtggtctgttgactcccttacacttggagggccttgtccagttccaagatgtctcctttgcctacccaaaccgcccagatgtcttagtgctacaggggctgacattcaccctacgccctggcgaggtgacggcgctggtgggacccaatgggtctgggaagagcacagtggctgccctgctgcagaatctgtaccagcccaccgggggacagctgctgttggatgggaagccccttccccaatatgagcaccgctacctgcacaggcaggtggctgcagtgggacaagagccacaggtatttggaagaagtcttcaagaaaatattgcctatggcctgacccagaagccaactatggaggaaatcacagctgctgcagtaaagtctggggcccatagtttcatctctggactccctcagggctatgacacagaggtagacgaggctgggagccagctgtcagggggtcagcgacaggcagtggcgttggcccgagcattgatccggaaaccgtgtgtacttatcctggatgatgccaccagtgccctggatgcaaacagccagttacaggtggagcagctcctgtacgaaagccctgagcggtactcccgctcagtgcttctcatcacccagcacctcagcctggtggagcaggctgaccacatcctctttctggaaggaggcgctatccgggaggggggaacccaccagcagctcatggagaaaaaggggtgctactgggccatggtgcaggctcctgcagatgctccagaatgaaagccttctcagacctgcgcactccatctccctcccttttcttctctctgtggtggagaaccacagctgcagagtagcagctgcctccaggatgagttacttgaaatttgccttgagtgtgttacctcctttccaagctcctcgtgataatgcagacttcctggagtacaaacacaggatttgtaattcctactgtaacggagtttagagccagggctgatgctttggtgtggccagcactctgaaactgagaaatgttcagaatgtacggaaagatgatcagctattttcaacataactgaaggcatatgctggcccataaacaccctgtaggttcttgatatttataataaaattggtgttttgt

SEQ ID NO: 1976 - protein, 808 aa, Homo sapien
MAELLASAGSACSWDFPRAPPSFPPPAASRGGLGGTRSFRPHRGAESPRPGRDRDGVRVPMASSRCPAPRGCRCLPGASLAWLGTVLLLLADWVLLRTALPRIFSLLVPTALPLLRVWAVGLSRWAVLWLGACGVLRATVGSKSENAGAQGWLAALKPLAAALGLALPGLALFRELISWGAPGSADSTRLLHWGSHPTAFVVSYAAALPAAALWHKLGSLWVPGGQGGSGNPVRRLLGCLGSETRRLSLFLVLVVLSSLGEMAIPFFTGRLTDWILQDGSADTFTRNLTLMSILTIASAVLEFVGDGIYNNTMGHVHSHLQGEVFGAVLRQETEFFQQNQTGNIMSRVTEDTSTLSDSLSENLSLFLWYLVRGLCLLGIMLWGSVSLTMVTLITLPLLFLLPKKVGKWYQLLEVQVRESLAKSSQVAIEALSAMPTVRSFANEEGEAQKFREKLQEIKTLNQKEAVAYAVNSWTTSISGMLLKVGILYIGGQLVTSGAVSSGNLVTFVLYQMQFTQAVEVLLSIYPRVQKAVGSSEKIFEYLDRTPRCPPSGLLTPLHLEGLVQFQDVSFAYPNRPDVLVLQGLTFTLRPGEVTALVGPNGSGKSTVAALLQNLYQPTGGQLLLDGKPLPQYEHRYLHRQVAAVGQEPQVFGRSLQENIAYGLTQKPTMEEITAAAVKSGAHSFISGLPQGYDTEVDEAGSQLSGGQRQAVALARALIRKPCVLILDDATSALDANSQLQVEQLLYESPERYSRSVLLITQHLSLVEQADHILFLEGGAIREGGTHQQLMEKKGCYWAMVQAPADAPE

SEQ ID NO: 1977 - DNA, 1270 bp, Homo sapien
caggggacaggctgcagccggtgcagttacacgttttcctccaaggagcctcggacgttgtcacgggtttggggtcggggacagagcagtgaccatggccaggctggcgttgtctcctgtgcccagccactggatggtggcgttgctgctgctgctctcagctgagccagtaccagcagccagatcggaggaccggtaccggaatcccaaaggtagtgcttgttcgcggatctggcagagcccacgtttcatagccaggaaacggggcttcacggtgaaaatgcactgctacatgaacagcgcctccggcaatgtgagctggctctggaagcaggagatggacgagaatccccagcagctgaagctggaaaagggccgcatggaagagtcccagaacgaatctctcgccaccctcaccatccaaggcatccggtttgaggacaatggcatctacttctgtcagcagaagtgcaacaacacctcggaggtctaccagggctgcggcacagagctgcgagtcatgggattcagcaccttggcacagctgaagcagaggaacacgctgaaggatggtatcatcatgatccagacgctgctgatcatcctcttcatcatcgtgcctatcttcctgctgctggacaaggatgacagcaaggctggcatggaggaagatcacacctacgagggcctggacattgaccagacagccacctatgaggacatagtgacgctgcggacaggggaagtgaagtggtctgtaggtgagcacccaggccaggagtgagagccaggtcgccccatgacctgggtgcaggctccctggcctcagtgactgcttcggagctgcctggctcatggcccaacccctttcctggaccccccagctggcctctgaagctggcccaccagagctgccatttgtctccagcccctggtccccagctcttgccaaagggcctggagtagaaggacaacagggcagcaacttggagggagttctctggggatggacgggacccagccttctgggggtgctatgaggtgatccgtccccacacatgggatgggggaggcagagactggtccagagcccgcaaatggactcggagccgagggcctcccagcagagcttgggaagggccatggacccaactgggccccagaagagccacaggaacatcattcctctcccgcaaccactcccaccccagggaggccctggcctccagtgccttcccccgtggaataaacggtgtgtcctgagaaacca

SEQ ID NO: 1978 - protein, 229 aa, Homo sapien
MARLALSPVPSHWMVALLLLLSAEPVPAARSEDRYRNPKGSACSRIWQSPRFIARKRGFTVKMHCYMNSASGNVSWLWKQEMDENPQQLKLEKGRMEESQNESLATLTIQGIRFEDNGIYFCQQKCNNTSEVYQGCGTELRVMGFSTLAQLKQRNTLKDGIIMIQTLLIILFIIVPIFLLLDKDDSKAGMEEDHTYEGLDIDQTATYEDIVTLRTGEVKWSVGEHPGQE

SEQ ID NO: 1979 - DNA, 1909 bp, Homo sapien
gaggtgtttcccttagctatggaaactctataagagagatccagcttgcctcctcttgagcagtcagcaacagggtcccgtccttgacacctcagcctctacaggactgagaagaagtaaaaccgtttgctggggctggcctgactcaccagctgccatgcagcagcccttcaattacccatatccccagatctactgggtggacagcagtgccagctctccctgggcccctccaggcacagttcttccctgtccaacctctgtgcccagaaggcctggtcaaaggaggccaccaccaccaccgccaccgccaccactaccacctccgccgccgccgccaccactgcctccactaccgctgccacccctgaagaagagagggaaccacagcacaggcctgtgtctccttgtgatgtttttcatggttctggttgccttggtaggattgggcctggggatgtttcagctcttccacctacagaaggagctggcagaactccgagagtctaccagccagatgcacacagcatcatctttggagaagcaaataggccaccccagtccaccccctgaaaaaaaggagctgaggaaagtggcccatttaacaggcaagtccaactcaaggtccatgcctctggaatgggaagacacctatggaattgtcctgctttctggagtgaagtataagaagggtggccttgtgatcaatgaaactgggctgtactttgtatattccaaagtatacttccggggtcaatcttgcaacaacctgcccctgagccacaaggtctacatgaggaactctaagtatccccaggatctggtgatgatggaggggaagatgatgagctactgcactactgggcagatgtgggcccgcagcagctacctgggggcagtgttcaatcttaccagtgctgatcatttatatgtcaacgtatctgagctctctctggtcaattttgaggaatctcagacgtttttcggcttatataagctctaagagaagcactttgggattctttccattatgattctttgttacaggcaccgagaatgttgtattcagtgagggtcttcttacatgcatttgaggtcaagtaagaagacatgaaccaagtggaccttgagaccacagggttcaaaatgtctgtagctcctcaactcacctaatgtttatgagccagacaaatggaggaatatgacggaagaacatagaactctgggctgccatgtgaagagggagaagcatgaaaaagcagctaccaggtgttctacactcatcttagtgcctgagagtatttaggcagattgaaaaggacaccttttaactcacctctcaaggtgggccttgctacctcaagggggactgtctttcagatacatggttgtgacctgaggatttaagggatggaaaaggaagactagaggcttgcataataagctaaagaggctgaaagaggccaatgccccactggcagcatcttcacttctaaatgcatatcctgagccatcggtgaaactaacagataagcaagagagatgttttggggactcatttcattcctaacacagcatgtgtatttccagtgcaattgtaggggtgtgtgtgtgtgtgtgtgtgtgtgtgtgtgtatgactaaagagagaatgtagatattgtgaagtacatattaggaaaatatgggttgcatttggtcaagattttgaatgcttcctgacaatcaactctaatagtgcttaaaaatcattgattgtcagctactaatgatgttttcctataatataataaatatttatgtagatgtgcatttttgtgaaatgaaaacatgtaataaaaagtatatgttaggatacaaaaaaaaaaaaaaaaaaaaaaaaaaaaaaaaaaaaaaaaaaaaaaaaaaaa

SEQ ID NO: 1980 - protein, 281 aa, Homo sapien
MQQPFNYPYPQIYWVDSSASSPWAPPGTVLPCPTSVPRRPGQRRPPPPPPPPPLPPPPPPPPLPPLPLPPLKKRGNHSTGLCLLVMFFMVLVALVGLGLGMFQLFHLQKELAELRESTSQMHTASSLEKQIGHPSPPPEKKELRKVAHLTGKSNSRSMPLEWEDTYGIVLLSGVKYKKGGLVINETGLYFVYSKVYFRGQSCNNLPLSHKVYMRNSKYPQDLVMMEGKMMSYCTTGQMWARSSYLGAVFNLTSADHLYVNVSELSLVNFEESQTFFGLYKL

SEQ ID NO: 1981 - DNA, 2324 bp, Homo sapien
ctccctttgggcaaggacctgagacccttgtgctaagtcaagaggctcaatgggctgcagaagaactagagaaggaccaagcaaagccatgatatttccatggaaatgtcagagcacccagagggacttatggaacatcttcaagttgtgggggtggacaatgctctgttgtgatttcctggcacatcatggaaccgactgctggacttaccattattctgaaaaacccatgaactggcaaagggctagaagattctgccgagacaattacacagatttagttgccatacaaaacaaggcggaaattgagtatctggagaagactctgcctttcagtcgttcttactactggataggaatccggaagataggaggaatatggacgtgggtgggaaccaacaaatctcttactgaagaagcagagaactggggagatggtgagcccaacaacaagaagaacaaggaggactgcgtggagatctatatcaagagaaacaaagatgcaggcaaatggaacgatgacgcctgccacaaactaaaggcagccctctgttacacagcttcttgccagccctggtcatgcagtggccatggagaatgtgtagaaatcatcaataattacacctgcaactgtgatgtggggtactatgggccccagtgtcagtttgtgattcagtgtgagcctttggaggccccagagctgggtaccatggactgtactcaccctttgggaaacttcagcttcagctcacagtgtgccttcagctgctctgaaggaacaaacttaactgggattgaagaaaccacctgtggaccatttggaaactggtcatctccagaaccaacctgtcaagtgattcagtgtgagcctctatcagcaccagatttggggatcatgaactgtagccatcccctggccagcttcagctttacctctgcatgtaccttcatctgctcagaaggaactgagttaattgggaagaagaaaaccatttgtgaatcatctggaatctggtcaaatcctagtccaatatgtcaaaaattggacaaaagtttctcaatgattaaggagggtgattataaccccctcttcattccagtggcagtcatggttactgcattctctgggttggcatttatcatttggctggcaaggagattaaaaaaaggcaagaaatccaagagaagtatgaatgacccatattaaatcgcccttggtgaaagaaaattcttggaatactaaaaatcatgagatcctttaaatccttccatgaaacgttttgtgtggtggcacctcctacgtcaaacatgaagtgtgtttccttcagtgcatctgggaagatttctacctgaccaacagttccttcagcttccatttcgcccctcatttatccctcaacccccagcccacaggtgtttatacagctcagctttttgtcttttctgaggagaaacaaataagaccataaagggaaaggattcatgtggaatataaagatggctgactttgctctttcttgactcttgttttcagtttcaattcagtgctgtacttgatgacagacacttctaaatgaagtgcaaatttgatacatatgtgaatatggactcagttttcttgcagatcaaatttcacgtcgtcttctgtatactgtggaggtacactcttatagaaagttcaaaaagtctacgctctcctttctttctaactccagtgaagtaatggggtcctgctcaagttgaaagagtcctatttgcactgtagcctcgccgtctgtgaattggaccatcctatttaactggcttcagcctccccaccttcttcagccacctctctttttcagttggctgacttccacacctagcatctcatgagtgccaagcaaaaggagagaagagagaaatagcctgcgctgttttttagtttgggggttttgctgtttccttttatgagacccattcctatttcttatagtcaatgtttcttttatcacgatattattagtaagaaaacatcactgaaatgctagctgcaagtgacatctctttgatgtcatatggaagagttaaaacaggtggagaaattccttgattcacaatgaaatgctctcctttcccctgcccccagaccttttatccacttacctagattctacatattctttaaatttcatctcaggcctccctcaaccccaccacttcttttataactagtcctttactaatccaacccatgatgagctcctcttcctggcttcttactgaaaggttaccctgtaacatgcaattttgcatttgaataaagcctgctttttaagtgttaa

SEQ ID NO: 1982 - protein, 372 aa, Homo sapien [sequence omitted]

SEQ ID NO: 1983 - DNA, 4910 bp, Homo sapien
tagacgcaccctctgaagatggtgactccctcctgagaagctggaccccttggtaaaagacaaggccttctccaagaagaatatgaaagtgttactcagacttatttgtttcatagctctactgatttcttctctggaggctgataaatgcaaggaacgtgaagaaaaaataattttagtgtcatctgcaaatgaaattgatgttcgtccctgtcctcttaacccaaatgaacacaaaggcactataacttggtataaagatgacagcaagacacctgtatctacagaacaagcctccaggattcatcaacacaaagagaaactttggtttgttcctgctaaggtggaggattcaggacattactattgcgtggtaagaaattcatcttactgcctcagaattaaaataagtgcaaaatttgtggagaatgagcctaacttatgttataatgcacaagccatatttaagcagaaactacccgttgcaggagacggaggacttgtgtgcccttatatggagttttttaaaaatgaaaataatgagttacctaaattacagtggtataaggattgcaaacctctacttcttgacaatatacactttagtggagtcaaagataggctcatcgtgatgaatgtggctgaaaagcatagagggaactatacttgtcatgcatcctacacatacttgggcaagcaatatcctattacccgggtaatagaatttattactctagaggaaaacaaacccacaaggcctgtgattgtgagcccagctaatgagacaatggaagtagacttgggatcccagatacaattgatctgtaatgtcaccggccagttgagtgacattgcttactggaagtggaatgggtcagtaattgatgaagatgacccagtgctaggggaagactattacagtgtggaaaatcctgcaaacaaaagaaggagtaccctcatcacagtgcttaatatatcggaaattgaaagtagattttataaacatccatttacctgttttgccaagaatacacatggtatagatgcagcatatatccagttaatatatccagtcactaatttccagaagcacatgattggtatatgtgtcacgttgacagtcataattgtgtgttctgttttcatctataaaatcttcaagattgacattgtgctttggtacagggattcctgctatgattttctcccaataaaagcttcagatggaaagacctatgacgcatatatactgtatccaaagactgttggggaagggtctacctctgactgtgatatttttgtgtttaaagtcttgcctgaggtcttggaaaaacagtgtggatataagctgttcatttatggaagggatgactacgttggggaagacattgttgaggtcattaatgaaaacgtaaagaaaagcagaagactgattatcattttagtcagagaaacatcaggcttcagctggctgggtggttcatctgaagagcaaatagccatgtataatgctcttgttcaggatggaattaaagttgtcctgcttgagctggagaaaatccaagactatgagaaaatgccagaatcgattaaattcattaagcagaaacatggggctatccgctggtcaggggactttacacagggaccacagtctgcaaagacaaggttctggaagaatgtcaggtaccacatgccagtccagcgacggtcaccttcatctaaacaccagttactgtcaccagccactaaggagaaactgcaaagagaggctcacgtgcctctcgggtagcatggagaagttgccaagagttctttaggtgcctcctgtcttatggcgttgcaggccaggttatgcctcatgctgacttgcagagttcatggaatgtaactatatcatcctttatccctgaggtcacctggaatcagattattaagggaataagccatgacgtcaatagcagcccagggcacttcagagtagagggcttgggaagatcttttaaaaaggcagtaggcccggtgtggtggctcacgcctataatcccagcactttgggaggctgaagtgggtggatcaccagaggtcaggagttcgagaccagcccagccaacatggcaaaaccccatctctactaaaaatacaaaaatgagctaggcatggtggcacacgcctgtaatcccagctacacctgaggctgaggcaggagaattgcttgaaccggggagacggaggttgcagtgagccgagtttgggccactgcactctagcctggcaacagagcaagactccgtctcaaaaaaagggcaataaatgccctctctgaatgtttgaactgccaagaaaaggcatggagacagcgaactagaagaaagggcaagaaggaaatagccaccgtctacagatggcttagttaagtcatccacagcccaagggcggggctatgccttgtctggggaccctgtagagtcactgaccctggagcggctctcctgagaggtgctgcaggcaaagtgagactgacacctcactgaggaagggagacatattcttggagaactttccatctgcttgtattttccatacacatccccagccagaagttagtgtccgaagaccgaattttattttacagagcttgaaaactcacttcaatgaacaaagggattctccaggattccaaagttttgaagtcatcttagctttccacaggagggagagaacttaaaaaagcaacagtagcagggaattgatccacttcttaatgctttcctccctggcatgaccatcctgtcctttgttattatcctgcattttacgtctttggaggaacagctccctagtggcttcctccgtctgcaatgtcccttgcacagcccacacatgaaccatccttcccatgatgccgctcttctgtcatcccgctcctgctgaaacacctcccaggggctccacctgttcaggagctgaagcccatgctttcccaccagcatgtcactcccagaccacctccctgccctgtcctccagcttcccctcgctgtcctgctgtgtgaattcccaggttggcctggtggccatgtcgcctgcccccagcactcctctgtctctgctcttgcctcgacccttcctcctcctttgcctaggaggccttctcgcattttctctagctgatcagaattttaccaaaattcagaacatcctccaattccacagtctctgggagactttccctaagaggcgacttcctctccagccttctctctctggtcaggcccactgcagagatggtggtgagcacatctgggaggctggtctccctccagctggaattgctgctctctgagggagaggctgtggtggctgtctctgtccctcactgccttccaggagcaatttgcacatgtaacatagatttatgtaatgctttatgtttaaaaacattccccaattatcttatttaatttttgcaattattctaattttatatatagagaaagtgacctattttttaaaaaaatcacactctaagttctattgaacctaggacttgagcctccatttctggcttctagtctggtgttctgagtacttgatttcaggtcaataacggtcccccctcactccacactggcacgtttgtgagaagaaatgacattttgctaggaagtgaccgagtctaggaatgcttttattcaagacaccaaattccaaacttctaaatgttggaattttcaaaaattgtgtttagattttatgaaaaactcttctactttcatctattctttccctagaggcaaacatttcttaaaatgtttcattttcattaaaaatgaaagccaaatttatatgccaccgattgcaggacacaagcacagttttaagagttgtatgaacatggagaggacttttggtttttatatttctcgtatttaatatgggtgaacaccaacttttatttggaataataattttcctcctaaacaaaaacacattgagtttaagtctctgactcttgcctttccacctgctttctcctgggcccgctttgcctgcttgaaggaacagtgctgttctggagctgctgttccaacagacagggcctagctttcatttgacacacagactacagccagaagcccatggagcagggatgtcacgtcttgaaaagcctattagatgttttacaaatttaattttgcagattattttagtctgtcatccagaaaatgtgtcagcatgcatagtgctaagaaagcaagccaatttggaaacttaggttagtgacaaaattggccagagagtgggggtgatgatgaccaagaattacaagtagaatggcagctggaatttaaggagggacaagaatcaatggataagcgtgggtggaggaagatccaaacagaaaagtgcaaagttattccccatcttccaagggttgaattctggaggaagaagacacattcctagttccccgtgaacttcctttgacttattgtccccactaaaacaaaacaaaaaacttttaatgccttccacattaattagattttcttgcagtttttttatggcatttttttaaagatgccctaagtgttgaagaagagtttgcaaatgcaacaaaaatatttaattaccggttgttaaaactggtttagcacaatttatattttccctctcttgcctttcttatttgcaataaaaggtattgagccattttttaaatgacatttttgataaattatgtttgtactagttgatgaaggagttttttttaacctgtttatataattttgcagcagaagccaaattttttgtatattaaagcaccaaattcatgtacagcatgcatcacggatcaatagactgtacttattttccaataaaattttcaaactttgtactgttaaa

SEQ ID NO: 1984 - protein, 569 aa, Homo sapien
MKVLLRLICFIALLISSLEADKCKEREEKIILVSSANEIDVRPCPLNPNEHKGTITWYKDDSKTPVSTEQASRIHQHKEKLWFVPAKVEDSGHYYCVVRNSSYCLRIKISAKFVENEPNLCYNAQAIFKQKLPVAGDGGLVCPYMEFFKNENNELPKLQWYKDCKPLLLDNIHFSGVKDRLIVMNVAEKHRGNYTCHASYTYLGKQYPITRVIEFITLEENKPTRPVIVSPANETMEVDLGSQIQLICNVTGQLSDIAYWKWNGSVIDEDDPVLGEDYYSVENPANKRRSTLITVLNISEIESRFYKHPFTCFAKNTHGIDAAYIQLIYPVTNFQKHMIGICVTLTVIIVCSVFIYKIFKIDIVLWYRDSCYDFLPIKASDGKTYDAYILYPKTVGEGSTSDCDIFVFKVLPEVLEKQCGYKLFIYGRDDYVGEDIVEVINENVKKSRRLIIILVRETSGFSWLGGSSEEQIAMYNALVQDGIKVVLLELEKIQDYEKMPESIKFIKQKHGAIRWSGDFTQGPQSAKTRFWKNVRYHMPVQRRSPSSKHQLLSPATKEKLQREAHVPLG

SEQ ID NO: 1985 - DNA, 816 bp, Homo sapien
atgcactttctttgccaaaggcaaacgcagaacgtttcagagccatgaggatgcttctgcatttgagtttgctagctcttggagctgcctacgtgtatgccatccccacagaaattcccacaagtgcattggtgaaagagaccttggcactgctttctactcatcgaactctgctgatagccaatgagactctgaggattcctgttcctgtacataaaaatcaccaactgtgcactgaagaaatctttcagggaataggcacactggagagtcaaactgtgcaagggggtactgtggaaagactattcaaaaacttgtccttaataaagaaatacattgacggccaaaaaaaaaagtgtggagaagaaagacggagagtaaaccaattcctagactacctgcaagagtttcttggtgtaatgaacaccgagtggataatagaaagttgagactaaactggtttgttgcagccaaagattttggaggagaaggacattttactgcagtgagaatgagggccaagaaagagtcaggccttaattttcaatataatttaacttcagagggaaagtaaatatttcaggcatactgacactttgccagaaagcataaaattcttaaaatatatttcagatatcagaatcattgaagtattttcctccaggcaaaattgatatacttttttcttatttaacttaacattctgtaaaatgtctgttaacttaatagtatttatgaaatggttaagaatttggtaaattagtatttatttaatgttatgttgtgttctaataaaacaaaaatagacaactgttc

SEQ ID NO: 1986 - protein, 134 aa, Homo sapien
MRMLLHLSLLALGAAYVYAIPTEIPTSALVKETLALLSTHRTLLIANETLRIPVPVHKNHQLCTEEIFQGIGTLESQTVQGGTVERLFKNLSLIKKYIDGQKKKCGEERRRVNQFLDYLQEFLGVMNTEWIIES

SEQ ID NO: 1987 - DNA, 2932 bp, Homo sapien
gtaatgcagagataataaaacttcttaggtccataggtcttataataatttaataacctaaacatggtatacaaattcctccaaacccaataacataattatagtttcaaaaagttccccaaactttcaagttagattttattgctttgatgagtggctttaaatatgaaaagtcttgcctgtgaagggcaatccttttcccgtggactgggatctatagaaatacagaaatgtgcccaggggttcatctccctaataaccatcattcacatttctcaacctccctaataaccagccaccatgtgagaaggatccacagttactgtttatgactataattaactagtacctgggactggtcagtggagttggttgcaacctgatgctaaggatgtcaaagttgtctcggcctctgttcccagccagtaagtaattccctggcctcgggccataccccctaatcttggtcagctgattatgacaggcagacagcacagtaaataacactatatattaagaaaacccaaagcatatgtatcaatggtatatacccaacagcatcctaggaatggagagtctgtagcaagggcctccaatgtgaaggtcaacacagtcactgtgatgcgtgtatttccattttgtaaagcatgatctctggtggtcatttttatcttcctaacttattggaaaagtctcctgttttgggggcccgcccctggtcacagccagactgactcagtttccctgggaggtcccgctcgagcccgtccttcccctccctctgcccgcccccagccctcgccccaccctcggcgcccgcacatctgcctgctcagctccagacggcgcccggacccccgggcgcgggatccagccaggtgggagccccgcagatgaggtctctgaaggtgtgcctgaaccagtgccagcctgccctgtctgcagcatcggcctgatggggtggtgactgatccctcagggctccggagccatgtggcccaacggcagttccctggggccctgtttccggcccacaaacattaccctggaggagagacggctgatcgcctcgccctggttcgccgcctccttctgcgtggtgggcctggcctccaacctgctggccctgagcgtgctggcgggcgcgcggcaggggggttcgcacacgcgctcctccttcctcaccttcctctgcggcctcgtcctcaccgacttcctggggctgctggtgaccggtaccatcgtggtgtcccagcacgccgcgctcttcgagtggcacgccgtggaccctggctgccgtctctgtcgcttcatgggcgtcgtcatgatcttcttcggcctgtccccgctgctgctgggggccgccatggcctcagagcgctacctgggtatcacccggcccttctcgcgcccggcggtcgcctcgcagcgccgcgcctgggccaccgtggggctggtgtgggcggccgcgctggcgctgggcctgctgcccctgctgggcgtgggtcgctacaccgtgcaatacccggggtcctggtgcttcctgacgctgggcgccgagtccggggacgtggccttcgggctgctcttctccatgctgggcggcctctcggtcgggctgtccttcctgctgaacacggtcagcgtggccaccctgtgccacgtctaccacgggcaggaggcggcccagcagcgtccccgggactccgaggtggagatgatggctcagctcctggggatcatggtggtggccagcgtgtgttggctgccccttctggtcttcattgcccagacagtgctgcgaaacccgcctgccatgagccccgccgggcagctgtcccgcaccacggagaaggagctgctcatctacttgcgcgtggccacctggaaccagatcctggacccctgggtgtatatcctgttccgccgcgccgtgctccggcgtctccagcctcgcctcagcacccggcccaggtcgctgtccctccagccccagctcacgcagcgctccgggctgcagtaggaagtggacagagcgcccctcccgcgcctttccgcggagcccttggcccctcggacagcccatctgcctgttctgaggattcaggggctgggggtgctggatggacagtgggcatcagcagcagggttttgggttgaccccaatccaacccggggacccccaactcctccctgatccttttaccaagcactctcccttcctcggcccctttttcccatccagagctcccaccccttctctgcgtccctcccaaccccaggaagggcatgcagacattggaagagggtcttgcattgctatttttttttttagacggagtcttgctctgtcccccaggctggagtgcagtggcgcaatctcagctcactgcaacctccacctcccgggttcaagcgattctcctgcctcagcctcctgagtagctgggactataggcgcgcgccaccacgcccggctaatttttgtatttttagtagagacggggtttcaccgtgttggccaggctggtcttgaactcctgacctcaggtgattcaccagcctcagcctcccaaagtgctgggatcacaggcatgaaccaccacacctggccattttttttttttttttagacggagtctcactctgtggcccagcctggagtacagtggcacgatctcggctcactgcaacctccgcctcccgggttcaagcgattctcgtgcctcagcctcccgagcagctgggattacaggcgtaagccactgcgcccggccttgcatgctctttgaccctgaatttgacctacttgctggggtacagttgcttccttttgaacctccaacagggaaggctctgtccagaaaggattgaatgtgaaacgggggcacccccttttcttgccaaaatatatctctgcctttggttttat

SEQ ID NO: 1988 - protein, 343 aa, Homo sapien
MWPNGSSLGPCFRPTNITLEERRLIASPWFAASFCVVGLASNLLALSVLAGARQGGSHTRSSFLTFLCGLVLTDFLGLLVTGTIVVSQHAALFEWHAVDPGCRLCRFMGVVMIFFGLSPLLLGAAMASERYLGITRPFSRPAVASQRRAWATVGLVWAAALALGLLPLLGVGRYTVQYPGSWCFLTLGAESGDVAFGLLFSMLGGLSVGLSFLLNTVSVATLCHVYHGQEAAQQRPRDSEVEMMAQLLGIMVVASVCWLPLLVFIAQTVLRNPPAMSPAGQLSRTTEKELLIYLRVATWNQILDPWVYILFRRAVLRRLQPRLSTRPRSLSLQPQLTQRSGLQ

SEQ ID NO: 1989 - DNA, 995 bp, Homo sapien
aagactcaaacttagaaacttgaattagatgtggtattcaaatccttacgtgccgcgaagacacagacagcccccgtaagaacccacgaagcaggcgaagttcattgttctcaacattctagctgctcttgctgcatttgctctggaattcttgtagagatattacttgtccttccaggctgttctttctgtagctcccttgttttctttttgtgatcatgttgcagatggctgggcagtgctcccaaaatgaatattttgacagtttgttgcatgcttgcataccttgtcaacttcgatgttcttctaatactcctcctctaacatgtcagcgttattgtaatgcaagtgtgaccaattcagtgaaaggaacgaatgcgattctctggacctgtttgggactgagcttaataatttctttggcagttttcgtgctaatgtttttgctaaggaagataagctctgaaccattaaaggacgagtttaaaaacacaggatcaggtctcctgggcatggctaacattgacctggaaaagagcaggactggtgatgaaattattcttccgagaggcctcgagtacacggtggaagaatgcacctgtgaagactgcatcaagagcaaaccgaaggtcgactctgaccattgctttccactcccagctatggaggaaggcgcaaccattcttgtcaccacgaaaacgaatgactattgcaagagcctgccagctgctttgagtgctacggagatagagaaatcaatttctgctaggtaattaaccatttcgactcgagcagtgccactttaaaaatcttttgtcagaatagatgatgtgtcagatctctttaggatgactgtatttttcagttgccgatacagctttttgtcctctaactgtggaaactctttatgttagatatatttctctaggttactgttgggagcttaatggtagaaacttccttggtttcatgattaaagtctttttttttcctga

SEQ ID NO: 1990 - protein, 184 aa, Homo sapien [sequence omitted]

SEQ ID NO: 1991 - DNA, 3630 bp, Homo sapien
atacgggagaactaaggctgaaacctcggaggaacaaccacttttgaagtgacttcgcggcgtgcgttgggtgcggactaggtggccccggcgggagtgtgctggagcctgaagtccacgcgcgcggctgagaaccgccgggaccgcacgtgggcgccgcgcgcttcccccgcttcccaggtgggcgccggccgccaggccacctcacgtccggccccggggatgcgcgtcctcctcgccgcgctgggactgctgttcctgggggcgctacgagccttcccacaggatcgacccttcgaggacacctgtcatggaaaccccagccactactatgacaaggctgtcaggaggtgctgttaccgctgccccatggggctgttcccgacacagcagtgcccacagaggcctactgactgcaggaagcagtgtgagcctgactactacctggatgaggccgaccgctgtacagcctgcgtgacttgttctcgagatgacctcgtggagaagacgccgtgtgcatggaactcctcccgtgtctgcgaatgtcgacccggcatgttctgttccacgtctgccgtcaactcctgtgcccgctgcttcttccattctgtctgtccggcagggatgattgtcaagttcccaggcacggcgcagaagaacacggtctgtgagccggcttccccaggggtcagccctgcctgtgccagcccagagaactgcaaggaaccctccagtggcaccatcccccaggccaagcccaccccggtgtccccagcaacctccagtgccagcaccatgcctgtaagagggggcacccgcctcgcccaggaagctgcttctaaactgacgagggctcccgactctccctcctctgtgggaaggcctagttcagatccaggtctgtccccaacacagccatgcccagaggggtctggtgattgcagaaagcagtgtgagcccgactactacctggacgaggccggccgctgcacagcctgcgtgagctgttctcgagatgaccttgtggagaagacgccatgtgcatggaactcctcccgcacctgcgaatgtcgacctggcatgatctgtgccacatcagccaccaactcctgtgcccgctgtgtcccctacccaatctgtgcagcagagacggtcaccaagccccaggatatggctgagaaggacaccacctttgaggcgccacccctggggacccagccggactgcaaccccaccccagagaatggcgaggcgcctgccagcaccagccccactcagagcttgctggtggactcccaggccagtaagacgctgcccatcccaaccagcgctcccgtcgctctctcctccacggggaagcccgttctggatgcagggccagtgctcttctgggtgatcctggtgttggttgtggtggtcggctccagcgccttcctcctgtgccaccggagggcctgcaggaagcgaattcggcagaagctccacctgtgctacccggtccagacctcccagcccaagctagagcttgtggattccagacccaggaggagctcaacgcagctgaggagtggtgcgtcggtgacagaacccgtcgcggaagagcgagggttaatgagccagccactgatggagacctgccacagcgtgggggcagcctacctggagagcctgccgctgcaggatgccagcccggccgggggcccctcgtcccccagggaccttcctgagccccgggtgtccacggagcacaccaataacaagattgagaaaatctacatcatgaaggctgacaccgtgatcgtggggaccgtgaaggctgagctgccggagggccggggcctggcggggccagcagagcccgagttggaggaggagctggaggcggaccataccccccactaccccgagcaggagacagaaccgcctctgggcagctgcagcgatgtcatgctctcagtggaagaggaagggaaagaagaccccttgcccacagctgcctctggaaagtgaggcctgggctgggctggggctaggagggcagcagggtggcctctgggaggccaggatggcactgttggcaccgaggttgggggcagaggcccatctggcctgaactgaggctccagcatctagtggtggaccggccggtcactgcaggggtctggtggtctctgcttgcatccccaacttagctgtcccctgacccagagcctaggggatccggggcttgtacagaagagacagtccaaggggactggatcccagcagtgatgttggttgaggcagcaaacagatggcaggatgggcactgccgagaacagcattggtcccagagccctgggcatcagaccttaaccaccaggcccacagcccagcgagggagaggtcgtgaggccagctcccggggcccctgtaaccctactctcctctctccctggacctcagaggtgacacccattgggcccttccggcatgcccccagttactgtaaatgtggcccccagtgggcatggagccagtgcctgtggttgtttctccagagtcaaaagggaagtcgagggatggggcgtcgtcagctggcactgtctctgctgcagcggccacactgtactctgcactggtgtgagggcccctgcctggactgtgggaccctcctggtgctgcccaccttccctgtcctgtagccccctcggtgggcccagggcctaggggcccaggatcaagtcactcatctcagaatgtccccaccaatccccgccacagcaggcgcctcgggtcccagatgtctgcagccctcagcagctgcagaccgcccctcaccaacccagagaacctgctttactttgcccagggacttcctccccatgtgaacatggggaacttcgggccctgcctggagtccttgaccgctctctgtgggccccacccactctgtcctgggaaatgaagaagcatcttccttaggtctgccctgcttgcaaatccactagcaccgaccccaccacctggttccggctctgcacgctttggggtgtggatgtcgagaggcaccacggcctcacccaggcatctgctttactctggaccataggaaacaagaccgtttggaggtttcatcaggattttgggtttttcacatttcacgctaaggagtagtggccctgacttccggtcggctggccagctgactccctagggccttcagacgtgtatgcaaatgagtgatggataaggatgagtcttggagttgcgggcagcctggagactcgtggacttaccgcctggaggcaggcccgggaaggctgctgtttactcatcgggcagccacgtgctctctggaggaagtgatagtttctgaaaccgctcagatgttttggggaaagttggagaagccgtggccttgcgagaggtggttacaccagaacctggacattggccagaagaagcttaagtgggcagacactgtttgcccagtgtttgtgcaaggatggagtgggtgtctctgcatcacccacagccgcagctgtaaggcacgctggaaggcacacgcctgccaggcagggcagtctggcgcccatgatgggagggattgacatgtttcaacaaaataatgcacttccttaaaaaaaa

SEQ ID NO: 1992 - protein, 595 aa, Homo sapien
MRVLLAALGLLFLGALRAFPQDRPFEDTCHGNPSHYYDKAVRRCCYRCPMGLFPTQQCPQRPTDCRKQCEPDYYLDEADRCTACVTCSRDDLVEKTPCAWNSSRVCECRPGMFCSTSAVNSCARCFFHSVCPAGMIVKFPGTAQKNTVCEPASPGVSPACASPENCKEPSSGTIPQAKPTPVSPATSSASTMPVRGGTRLAQEAASKLTRAPDSPSSVGRPSSDPGLSPTQPCPEGSGDCRKQCEPDYYLDEAGRCTACVSCSRDDLVEKTPCAWNSSRTCECRPGMICATSATNSCARCVPYPICAAETVTKPQDMAEKDTTFEAPPLGTQPDCNPTPENGEAPASTSPTQSLLVDSQASKTLPIPTSAPVALSSTGKPVLDAGPVLFWVILVLVVVVGSSAFLLCHRRACRKRIRQKLHLCYPVQTSQPKLELVDSRPRRSSTQLRSGASVTEPVAEERGLMSQPLMETCHSVGAAYLESLPLQDASPAGGPSSPRDLPEPRVSTEHTNNKIEKIYIMKADTVIVGTVKAELPEGRGLAGPAEPELEEELEADHTPHYPEQETEPPLGSCSDVMLSVEEEGKEDPLPTAASGK

SEQ ID NO: 1993 - DNA, 1131 bp, Homo sapien
atggcactgactgcccacccctcctgcctcctggccctgttggtggcaggcctagcccaaggcatcagaggcccccttagggcccaggacctaggtccccagccgctagagctgaaagaggccttcaagttgttccagatccagttcaaccggagttacctgagcccagaagagcatgctcaccgcctggacatctttgcccacaacctggcccaggctcagaggctgcaggaggaggacttgggcacagctgagtttggggtgactccattcagtgacctcacagaggaggagtttggccagctctatggctatcggagggcagctggaggggtccccagcatgggcagagaaataaggtctgaagagccagaggagtcagtacctttcagctgtgactggcggaaggtggccggcgccatctcacccatcaaggaccagaaaaactgcaactgctgctgggccatggcagcggcaggcaacatagagaccctgtggcgcatcagtttctgggattttgtggacgtctccgtgcatgaactgctggactgtggccgctgtggggatggctgccacggtggcttcgtctgggacgcgttcataactgtcctcaacaacagcggcctggccagtgaaaaggactacccgttccagggcaaagtcagagcccacaggtgccaccccaagaagtaccagaaggtggcctggatccaggacttcatcatgctgcagaacaacgagcacagaattgcgcagtacctggccacttatggccccatcaccgtgaccatcaacatgaagccccttcagctataccggaaaggtgtgatcaaggccacacccaccacctgtgacccccagcttgtggaccactctgtcctgctggtgggttttggcagcgtcaagtcagaggaggggatatgggcagagacagtctcatcgcagtctcagcctcagcctccacaccccaccccatactggatcctgaagaactcctggggggcccaatggggagagaagggctatttccggctgcaccgagggagcaatacctgtggcatcaccaagttcccgctcactgcccgtgtgcagaaaccggatatgaagccccgagtctcctgccctccctga

SEQ ID NO: 1994 - protein, 376 aa, Homo sapien [sequence omitted]

SEQ ID NO: 1995 - DNA, 3100 bp, Homo sapien; identical to SEQ ID NO: 560

SEQ ID NO: 1996 - protein, 355 aa, Homo sapien; identical to SEQ ID NO: 561

SEQ ID NO: 1997 - DNA, 1908 bp, Homo sapien
gcggaaggaaccgccgggggccatggacggagcagtgatggaagggccgctttttttgcagagtcagcgctttgggaccaagaggtggaggaagacctgggccgtgctctacccggccagtccccacggcgtagcgcggctcgagttctttgaccataaggggtcgagctctgggggtggccgagggagctcgcgccgcctggactgcaaagtgatccgtctggctgagtgtgtgagtgtggcccccgtcaccgtggagaccccccctgagcccggcgccactgccttccgcctggacactgctcagcgctcgcacctgctggcggccgacgcgccgtccagtgcagcctgggtgcagacgctgtgccgaaacgcctttccgaaaggcagctggactctggcgcctaccgataacccacctaagctttctgccctggagatgctggagaactccttgtacagccctacctgggaaggatcccaattctgggtaacggtgcagaggactgaggccgccgagcgctgtggcctgcatggctcctacgtgctgagggtggaggctgaaaggctgactctcctgaccgtgggggcccagagtcagatactggagccactcctgtcctggccctacactctgttgcgtcgctatggccgggacaaggtcatgttctctttcgaggccggccgccgctgcccctcaggccctggaaccttcaccttccagacggcacagggaaatgacatcttccaggcagttgagactgccatccaccggcagaaggcccagggaaaggccggacaggggcacgatgttctcagagctgactcccatgaaggggaggtggcagaggggaagttgccttccccacctggcccccaagagctcctcgacagtcccccagccctgtatgctgagcccttagactccctgcgcattgctccatgcccttcccaggactccctatactcagaccccttggacagcacgtctgctcaggcaggagagggagtacaacggaagaaacctctctattgggacttgtatgagcatgcgcagcagcagttgctgaaggccaagctgacagaccccaaagaggatcccatctatgatgaacctgagggcctggccccagtccctccccagggcctttatgatctgcctcgggagcccaaggatgcatggtggtgccaagctcgggtgaaggaggagggctatgagctcccctacaaccctgccactgatgactacgctgtgccaccccctcggagcacaaagcccctccttgctcccaagccccagggcccagccttccctgaacctggtactgcaactggcagtggcatcaaaagccacaactcagccctgtacagccaggtccagaagagcggggcctcagggagctgggactgtgggctctctagagtagggactgacaagactggggtcaagtcagagggctctacctgagaaggacggcaaggctgaggtggctaagggggaccatggggaggtggcactagggatcaaagaagatggttagaaccagcagaagccagagggtgggaggggccatgctgtgtgagaccaggggaccagagggatgggagagtcaagggaaggacaatcccaggaagtcctaagaagtggggcagatggcagggctgaggatgggctctgcatcccccaaagccatcccttccctacttccccaaatgaagggacggctgtgggaccaggtctgtggaaagtggtgcatggtcagaatgggtgcagtttgaggggcctgtgtggaggcctcagggagatgttggactgtgcctggatccttactcctgcattgttctttgccagagacctatttaaaaattttaaaattctcattaaagtcaaaaaaaaaaaaaaaaaaa

SEQ ID NO: 1998 - protein, 481 aa, Homo sapien [sequence omitted]

SEQ ID NO: 1999 - DNA, 1124 bp, Homo sapien
gccgctgccaccgcaccccgccatggagcggccgtcgctgcgcgccctgctcctcggcgccgctgggctgctgctcctgctcctgcccctctcctcttcctcctcttcggacacctgcggcccctgcgagccggcctcctgcccgcccctgcccccgctgggctgcctgctgggcgagacccgcgacgcgtgcggctgctgccctatgtgcgcccgcggcgagggcgagccgtgcgggggtggcggcgccggcagggggtactgcgcgccgggcatggagtgcgtgaagagccgcaagaggcggaagggtaaagccggggcagcagccggcggtccgggtgtaagcggcgtgtgcgtgtgcaagagccgctacccggtgtgcggcagcgacggcaccacctacccgagcggctgccagctgcgcgccgccagccagagggccgagagccgcggggagaaggccatcacccaggtcagcaagggcacctgcgagcaaggtccttccatagtgacgccccccaaggacatctggaatgtcactggtgcccaggtgtacttgagctgtgaggtcatcggaatcccgacacctgtcctcatctggaacaaggtaaaaaggggtcactatggagttcaaaggacagaactcctgcctggtgaccgggacaacctggccattcagacccggggtggcccagaaaagcatgaagtaactggctgggtgctggtatctcctctaagtaaggaagatgctggagaatatgagtgccatgcatccaattcccaaggacaggcttcagcatcagcaaaaattacagtggttgatgccttacatgaaataccagtgaaaaaaggtgaaggtgccgagctataaacctccagaatattattagtctgcatggttaaaagtagtcatggataactacattacctgttcttgcctaataagtttcttttaatccaatccactaacactttagttatattcactggttttacacagagaaatacaaaataaagatcacacatcaagactatctacaaaaatttattatatatttacagaagaaaagcatgcatatcattaaacaaataaaatactttttatcacaaaaaaaaaaaaaaaa

SEQ ID NO: 2000 - protein, 282 aa, Homo sapien
MERPSLRALLLGAAGLLLLLLPLSSSSSSDTCGPCEPASCPPLPPLGCLLGETRDACGCCPMCARGEGEPCGGGGAGRGYCAPGMECVKSRKRRKGKAGAAAGGPGVSGVCVCKSRYPVCGSDGTTYPSGCQLRAASQRAESRGEKAITQVSKGTCEQGPSIVTPPKDIWNVTGAQVYLSCEVIGIPTPVLIWNKVKRGHYGVQRTELLPGDRDNLAIQTRGGPEKHEVTGWVLVSPLSKEDAGEYECHASNSQGQASASAKITVVDALHEIPVKKGEGAEL

SEQ ID NO: 2001 - DNA, 1172 bp, Homo sapien
gagacattcctcaattgcttagacatattctgagcctacagcagaggaacctccagtctcagcaccatgaatcaaactgcgattctgatttgctgccttatctttctgactctaagtggcattcaaggagtacctctctctagaaccgtacgctgtacctgcatcagcattagtaatcaacctgttaatccaaggtctttagaaaaacttgaaattattcctgcaagccaattttgtccacgtgttgagatcattgctacaatgaaaaagaagggtgagaagagatgtctgaatccagaatcgaaggccatcaagaatttactgaaagcagttagcaaggaaatgtctaaaagatctccttaaaaccagaggggagcaaaatcgatgcagtgcttccaaggatggaccacacagaggctgcctctcccatcacttccctacatggagtatatgtcaagccataattgttcttagtttgcagttacactaaaaggtgaccaatgatggtcaccaaatcagctgctactactcctgtaggaaggttaatgttcatcatcctaagctattcagtaataactctaccctggcactataatgtaagctctactgaggtgctatgttcttagtggatgttctgaccctgcttcaaatatttccctcacctttcccatcttccaagggtactaaggaatctttctgctttggggtttatcagaattctcagaatctcaaataactaaaaggtatgcaatcaaatctgctttttaaagaatgctctttacttcatggacttccactgccatcctcccaaggggcccaaattctttcagtggctacctacatacaattccaaacacatacaggaaggtagaaatatctgaaaatgtatgtgtaagtattcttatttaatgaaagactgtacaaagtataagtcttagatgtatatatttcctatattgttttcagtgtacatggaataacatgtaattaagtactatgtatcaatgagtaacaggaaaattttaaaaatacagatagatatatgctctgcatgttacataagataaatgtgctgaatggttttcaaataaaaatgaggtactctcctggaaatattaagaaagactatctaaatgttgaaagatcaaaaggttaataaagtaattataact

SEQ ID NO: 2002 - protein, 98 aa, Homo sapien
MNQTAILICCLIFLTLSGIQGVPLSRTVRCTCISISNQPVNPRSLEKLEIIPASQFCPRVEIIATMKKKGEKRCLNPESKAIKNLLKAVSKEMSKRSP

SEQ ID NO: 2003 - DNA, 3583 bp, Homo sapien
cgcggacccggccggcccaggcccgcgcccgccgcggccctgagaggccccggcaggtcccggcccggcggcggcagccatggccggggggccgggcccgggggagcccgcagcccccggcgcccagcacttcttgtacgaggtgccgccctgggtcatgtgccgcttctacaaagtgatggacgccctggagcccgccgactggtgccagttcgccgccctgatcgtgcgcgaccagaccgagctgcggctgtgcgagcgctccgggcagcgcacggccagcgtcctgtggccctggatcaaccgcaacgcccgtgtggccgacctcgtgcacatcctcacgcacctgcagctgctccgtgcgcgggacatcatcacagcctggcaccctcccgccccgcttccgtccccaggcaccactgccccgaggcccagcagcatccctgcacccgccgaggccgaggcctggagcccccggaagttgccatcctcagcctccaccttcctctccccagcttttccaggctcccagacccattcagggcctgagctcggcctggttccaagccctgcttccctgtggcctccaccgccatctccagccccttcttctaccaagccaggcccagagagctcagtgtccctcctgcagggagcccgcccctctccgttttgctggcccctctgtgagatttcccggggcacccacaacttctcggaggagctcaagatcggggagggtggctttgggtgcgtgtaccgggcggtgatgaggaacacggtgtatgctgtgaagaggctgaaggagaacgctgacctggagtggactgcagtgaagcagagcttcctgaccgaggtggagcagctgtccaggtttcgtcacccaaacattgtggactttgctggctactgtgctcagaacggcttctactgcctggtgtacggcttcctgcccaacggctccctggaggaccgtctccactgccagacccaggcctgcccacctctctcctggcctcagcgactggacatccttctgggtacagcccgggcaattcagtttctacatcaggacagccccagcctcatccatggagacatcaagagttccaacgtccttctggatgagaggctgacacccaagctgggagactttggcctggcccggttcagccgctttgccgggtccagccccagccagagcagcatggtggcccggacacagacagtgcggggcaccctggcctacctgcccgaggagtacatcaagacgggaaggctggctgtggacacggacaccttcagctttggggtggtagtgctagagaccttggctggtcagagggctgtgaagacgcacggtgccaggaccaagtatctgaaagacctggtggaagaggaggctgaggaggctggagtggctttgagaagcacccagagcacactgcaagcaggtctggctgcagatgcctgggctgctcccatcgccatgcagatctacaagaagcacctggaccccaggcccgggccctgcccacctgagctgggcctgggcctgggccagctggcctgctgctgcctgcaccgccgggccaaaaggaggcctcctatgacccaggtgtacgagaggctagagaagctgcaggcagtggtggcgggggtgcccgggcatttggaggccgccagctgcatccccccttccccgcaggagaactcctacgtgtccagcactggcagagcccacagtggggctgctccatggcagcccctggcagcgccatcaggagccagtgcccaggcagcagagcagctgcagagaggccccaaccagcccgtggagagtgacgagagcctaggcggcctctctgctgccctgcgctcctggcacttgactccaagctgccctctggacccagcacccctcagggaggccggctgtcctcagggggacacggcaggagaatcgagctgggggagtggcccaggatcccggcccacagccgtggaaggactggcccttggcagctctgcatcatcgtcgtcagagccaccgcagattatcatcaaccctgcccgacagaagatggtccagaagctggccctgtacgaggatggggccctggacagcctgcagctgctgtcgtccagctccctcccaggcttgggcctggaacaggacaggcaggggcccgaagaaagtgatgaatttcagagctgatgtgttcacctgggcagatcccccaaatccggaagtcaaagttctcatggtcagaagttctcatggtgcacgagtcctcagcactctgccggcagtgggggtgggggcccatgcccgcgggggagagaaggaggtggccctgctgttctaggctctgtgggcataggcaggcagagtggaaccctgcctccatgccagcatctgggggcaaggaaggctggcatcatccagtgaggaggctggcgcatgttgggaggctgctggctgcacagacccgtgaggggaggagaggggctgctgtgcaggggtgtggagtagggagctggctcccctgagagccatgcagggcgtctgcagcccaggcctctggcagcagctctttgcccatctctttggacagtggccaccctgcacaatggggccgacgaggcctagggccctcctacctgcttacaatttggaaaagtgtggccgggtgcggtggctcacgcctgtaatcccagcactttgggaggccaaggcaggaggatcgctggagcccagtaggtcaagaccagccagggcaacatgatgagaccctgtctctgccaaaaaattttttaaactattagcctggcgtggtagcgcacgcctgtggtcccagctgctggggaggctgaagtaggaggatcatttatgcttgggaggtcgaggctgcagtgagtcatgattgtatgactgcactccagcctgggtgacagagcaagaccctgtttcaaaaagaaaaaccctgggaaaagtgaagtatggctgtaagtctcatggttcagtcctagcaagaagcgagaattctgagatcctccagaaagtcgagcagcacccacctccaacctcgggccagtgtcttcaggctttactggggacctgcgagctggcctaatgtggtggcctgcaagccaggccatccctgggcgccacagacgagctccgagccaggtcaggcttcggaggccacaagctcagcctcaggcccaggcactgattgtggcagaggggccactacccaaggtctagctaggcccaagacctagttacccagacagtgagaagcccctggaaggcagaaaagttgggagcatggcagacagggaagggaaacattttcagggaaaagacatgtatcacatgtcttcagaagcaagtcaggtttcatgtaaccgagtgtcctcttgcgtgtccaaaagtagcccagggctgtagcacaggcttcacagtgattttgtgttcagccgtgagtcacactacatgcccccgtgaagctgggcattggtgacgtccaggttgtccttgagtaataaaaacgtatgttccctaaaaaaaaaaaaa

SEQ ID NO: 2004 - protein, 712 aa, Homo sapien
MAGGPGPGEPAAPGAQHFLYEVPPWVMCRFYKVMDALEPADWCQFAALIVRDQTELRLCERSGQRTASVLWPWINRNARVADLVHILTHLQLLRARDIITAWHPPAPLPSPGTTAPRPSSIPAPAEAEAWSPRKLPSSASTFLSPAFPGSQTHSGPELGLVPSPASLWPPPPSPAPSSTKPGPESSVSLLQGARPSPFCWPLCEISRGTHNFSEELKIGEGGFGCVYRAVMRNTVYAVKRLKENADLEWTAVKQSFLTEVEQLSRFRHPNIVDFAGYCAQNGFYCLVYGFLPNGSLEDRLHCQTQACPPLSWPQRLDILLGTARAIQFLHQDSPSLIHGDIKSSNVLLDERLTPKLGDFGLARFSRFAGSSPSQSSMVARTQTVRGTLAYLPEEYIKTGRLAVDTDTFSFGVVVLETLAGQRAVKTHGARTKYLKDLVEEEAEEAGVALRSTQSTLQAGLAADAWAAPIAMQIYKKHLDPRPGPCPPELGLGLGQLACCCLHRRAKRRPPMTQVYERLEKLQAVVAGVPGHLEAASCIPPSPQENSYVSSTGRAHSGAAPWQPLAAPSGASAQAAEQLQRGPNQPVESDESLGGLSAALRSWHLTPSCPLDPAPLREAGCPQGDTAGESSWGSGPGSRPTAVEGLALGSSASSSSEPPQIIINPARQKMVQKLALYEDGALDSLQLLSSSSLPGLGLEQDRQGPEESDEFQS

SEQ ID NO: 2005 - DNA, 5496 bp, Homo sapien
attcagccggtgcgcgcggcggcgggaggcagtggctggggagtcccgtcgacgctctgttccgagagcgtgccccggaccgccagctcagaacaggggcagccgtgtagccgaacggaagctgggagcagccgggactggtggcccgcgcccgagctccgcaggcgggaagcaccctggatttgggaagtcccgggagcagcgcggcggcacctccctcacccaaggggccgcggcgacggtcacggggcgcggcgccaccgtgagcgacccaggccaggattctaaatagacggcccaggctcctcctccgcccgggccgcctcacctgcgggcattgccgcgccgcctccgccggtgtagacggcacctgcgccgccttgctcgcgggtctccgcccctcgcccaccctcactgcgccaggcccaggcagctcacctgtactggcgcgggctgcggaagcctgcgtgagccgaggcgttgaggcgcggcgcccacgccactgtcccgagaggacgcaggtggagcgggcgcggcttcgcggaacccggcgccggccgccgcagtggtcccagcctacaccgggttccggggacccggccgccagtgcccggggagtagccgccgccgtcggctgggcaccatgaacagcagcagcgccaacatcacctacgccagtcgcaagcggcggaagccggtgcagaaaacagtaaagccaatcccagctgaaggaatcaagtcaaatccttccaagcggcatagagaccgacttaatacagagttggaccgtttggctagcctgctgcctttcccacaagatgttattaataagttggacaaactttcagttcttaggctcagcgtcagttacctgagagccaagagcttctttgatgttgcattaaaatcctcccctactgaaagaaacggaggccaggataactgtagagcagcaaatttcagagaaggcctgaacttacaagaaggagaattcttattacaggctctgaatggctttgtattagttgtcactacagatgctttggtcttttatgcttcttctactatacaagattatctagggtttcagcagtctgatgtcatacatcagagtgtatatgaacttatccataccgaagaccgagctgaatttcagcgtcagctacactgggcattaaatccttctcagtgtacagagtctggacaaggaattgaagaagccactggtctcccccagacagtagtctgttataacccagaccagattcctccagaaaactctcctttaatggagaggtgcttcatatgtcgtctaaggtgtctgctggataattcatctggttttctggcaatgaatttccaagggaagttaaagtatcttcatggacagaaaaagaaagggaaagatggatcaatacttccacctcagttggctttgtttgcgatagctactccacttcagccaccatccatacttgaaatccggaccaaaaattttatctttagaaccaaacacaaactagacttcacacctattggttgtgatgccaaaggaagaattgttttaggatatactgaagcagagctgtgcacgagaggctcaggttatcagtttattcatgcagctgatatgctttattgtgccgagtcccatatccgaatgattaagactggagaaagtggcatgatagttttccggcttcttacaaaaaacaaccgatggacttgggtccagtctaatgcacgcctgctttataaaaatggaagaccagattatatcattgtaactcagagaccactaacagatgaggaaggaacagagcatttacgaaaacgaaatacgaagttgccttttatgtttaccactggagaagctgtgttgtatgaggcaaccaacccttttcctgccataatggatcccttaccactaaggactaaaaatggcactagtggaaaagactctgctaccacatccactctaagcaaggactctctcaatcctagttccctcctggctgccatgatgcaacaagatgagtctatttatctctatcctgcttcaagtacttcaagtactgcaccttttgaaaacaactttttcaacgaatctatgaatgaatgcagaaattggcaagataatactgcaccgatgggaaatgatactatcctgaaacatgagcaaattgaccagcctcaggatgtgaactcatttgctggaggtcacccagggctctttcaagatagtaaaaacagtgacttgtacagcataatgaaaaacctaggcattgattttgaagacatcagacacatgcagaatgaaaaatttttcagaaatgatttttctggtgaggttgacttcagagacattgacttaacggatgaaatcctgacgtatgtccaagattctttaagtaagtctcccttcataccttcagattatcaacagcaacagtccttggctctgaactcaagctgtatggtacaggaacacctacatctagaacagcaacagcaacatcaccaaaagcaagtagtagtggagccacagcaacagctgtgtcagaagatgaagcacatgcaagttaatggcatgtttgaaaattggaactctaaccaattcgtgcctttcaattgtccacagcaagacccacaacaatataatgtctttacagacttacatgggatcagtcaagagttcccctacaaatctgaaatggattctatgccttatacacagaactttatttcctgtaatcagcctgtattaccacaacattccaaatgtacagagctggactaccctatggggagttttgaaccatccccataccccactacttctagtttagaagattttgtcacttgtttacaacttcctgaaaaccaaaagcatggattaaatccacagtcagccataataactcctcagacatgttatgctggggccgtgtcgatgtatcagtgccagccagaacctcagcacacccacgtgggtcagatgcagtacaatccagtactgccaggccaacaggcatttttaaacaagtttcagaatggagttttaaatgaaacatatccagctgaattaaataacataaataacactcagactaccacacatcttcagccacttcatcatccgtcagaagccagaccttttcctgatttgacatccagtggattcctgtaattccaagcccaattttgaccctggtttttggattaaattagtttgtgaaggattatggaaaaataaaactgtcactgttggacgtcagcaagttcacatggaggcattgatgcatgctattcacaattattccaaaccaaattttaatttttgcttttagaaaagggagtttaaaaatggtatcaaaattacatatactacagtcaagatagaaagggtgctgccacggagtggtgaggtaccgtctacatttcacattattctgggcaccacaaaatatacaaaactttatcagggaaactaagattcttttaaattagaaaatattctctatttgaattatttctgtcacagtaaaaataaaatactttgagttttgagctactggattcttattagttccccaaatacaaagttagagaactaaactagtttttcctatcatgttaacctctgcttttatctcagatgttaaaataaatggtttggtgctttttataaaaagataatctcagtgctttcctccttcactgtttcatctaagtgcctcacatttttttctacctataacactctaggatgtatattttatataaagtattctttttcttttttaaattaatatctttctgcacacaaatattatttgtgtttcctaaatccaaccaattttcattaattcaggcatattttaactccactgcttacctactttcttcaggtaaaagggcaaataatgatcgaaaaaataattatttattacataatttagttgtttctagactataaatgttgctatgtgccttatgttgaaaaaatttaaaagtaaaatgtctttccaaattatttcttaattattataaaaatattaagacaatagcacttaaattcctcaacagtgttttcagaagaaataaatataccactctttacctttattgatatctccatgatgatagttgaatgttgcaatgtgaaaaatctgctgttaactgcaaccttgtttattaaattgcaagaagctttatttctagctttttaattaagcaaagcacccatttcaatgtgtataaattgtctttaaaaactgttttagacctataatccttgataatatattgtgttgactttataaatttcgcttcttagaacagtggaaactatgtgtttttctcatatttgaggagtgttaagattgcagatagcaaggtttggtgcaaagtattgtaatgagtgaattgaatggtgcattgtatagatataatgaacaaaattatttgtaagatatttgcagtttttcattttaaaaagtccataccttatatatgcacttaatttgttggggctttacatactttatcaatgtgtctttctaagaaatcaagtaatgaatccaactgcttaaagttggtattaataaaaagacaaccacatagttcgtttaccttcaaactttaggtttttttaatgatatactgatcttcattaccaataggcaaattaatcaccctaccaactttactgtcctaacatggactttcaaaaagaaaaaatgacaccatcttttattctttttttttttttttttttgagagagagtcttactctgccgcccaaactggagtgcagtggcacaatcttggctcactgcaacctctacctcctgggttcaagtgattctcttgcctcagcctcccgagttgctgggattgcgggcatggtggcgtgagcctgtagtcctagctactcgggaggctgaggcaggagaatagcctgaacctgggaatcggaggttgcagggccaagatcgccccactgcactccagcctggcaatagaccgagctccgtctccaaaaaaaaaaatacaatttttatttcttttactttttttagtaagttaatgtatataaaaatggcttcggacaaaatatctctgagttctgtgtattttcagtcaaaactttaaacctgtagaatcaatttaagtgttgaaaaaaatttgtctgaaacatttcataatttgtttccagcatgaggtatctaaggatttagaccagaggtctagattaatactctatttttacatttaaaccttttattataagtcttacataaaccatttttgttactctcttccacatgttactggataaattgtttagtggaaaataggctttttaatcatgaatatgatgacaatcagttatacagttataaaattaaaagtttgaaaagcaatattgtatatttttatctatataaaataactaaaatgtatctaagaataataaaatcacgttaaacc

SEQ ID NO: 2006 - protein, 848 aa, Homo sapien
MNSSSANITYASRKRRKPVQKTVKPIPAEGIKSNPSKRHRDRLNTELDRLASLLPFPQDVINKLDKLSVLRLSVSYLRAKSFFDVALKSSPTERNGGQDNCRAANFREGLNLQEGEFLLQALNGFVLVVTTDALVFYASSTIQDYLGFQQSDVIHQSVYELIHTEDRAEFQRQLHWALNPSQCTESGQGIEEATGLPQTVVCYNPDQIPPENSPLMERCFICRLRCLLDNSSGFLAMNFQGKLKYLHGQKKKGKDGSILPPQLALFAIATPLQPPSILEIRTKNFIFRTKHKLDFTPIGCDAKGRIVLGYTEAELCTRGSGYQFIHAADMLYCAESHIRMIKTGESGMIVFRLLTKNNRWTWVQSNARLLYKNGRPDYIIVTQRPLTDEEGTEHLRKRNTKLPFMFTTGEAVLYEATNPFPAIMDPLPLRTKNGTSGKDSATTSTLSKDSLNPSSLLAAMMQQDESIYLYPASSTSSTAPFENNFFNESMNECRNWQDNTAPMGNDTILKHEQIDQPQDVNSFAGGHPGLFQDSKNSDLYSIMKNLGIDFEDIRHMQNEKFFRNDFSGEVDFRDIDLTDEILTYVQDSLSKSPFIPSDYQQQQSLALNSSCMVQEHLHLEQQQQHHQKQVVVEPQQQLCQKMKHMQVNGMFENWNSNQFVPFNCPQQDPQQYNVFTDLHGISQEFPYKSEMDSMPYTQNFISCNQPVLPQHSKCTELDYPMGSFEPSPYPTTSSLEDFVTCLQLPENQKHGLNPQSAIITPQTCYAGAVSMYQCQPEPQHTHVGQMQYNPVLPGQQAFLNKFQNGVLNETYPAELNNINNTQTTTHLQPLHHPSEARPFPDLTSSGFL

SEQ ID NO: 2007 - DNA, 2254 bp, Homo sapien
aaagaaccgcacaccacagactccctccagctctttgtgtgtggctctctcagggtccaacaagagcaagctgtgggtctgtgagtgtttatgtgtgcttttattcacttcacacttattgaaaagtgtgtatgtgagagggtggggtgtgtgtgtcaaagagagtgaggaagagaaggagagagagatcaattgattctgcagcctcagctccagcatccctcagttgggagcttccaaagccgggtgatcacttggggtgcatagctcggagatgcagtccccctggaaaatccttacggtggcgcctctattcttgctcctgtctcttcagtcctcggcctctccagccaacgatgaccagtccaggcccagcctctcgaatgggcacacctgtgtagggtgtgtgctggtggtgtctgtaatagaacagcttgctcaagttcacaactcgacggtccaggcctcgatggagagactgtgcagctacctgcctgaaaaactgttcttgaaaaccacctgctatttagtcattgacaagtttggatcagacatcataaaactgcttagcgcagatatgaatgctgatgtggtatgtcacactctggagttttgtaaacagaacactggccaaccattgtgtcatctctaccctcttcccaaggagacatggaaatttacactacagaaggcaagacaaattgtcaagaagtccccgattctgaaatattctagaagtggttctgacatttgttcactcccggttttggccaagatctgccagaaaattaaattagctatggaacagtctgtgccattcaaagatgtggattcagacaaatacagcgttttcccaacactgcggggctatcactggcgggggagagactgtaatgacagcgacgagtcagtgtacccaggtagaaggccgaacaactgggatgtccatcaggattcaaactgtaatggcatttggggtgtcgatccaaaagatggagttccatatgagaagaaattctgtgaaggttcacagcccaggggaatcattttgctgggagactcagctggggctcattttcacatctctcctgaatggatcacagcgtcgcagatgtctttgaactctttcatcaatctaccaacagcccttaccaacgagcttgactggccccaactctctggtgctacaggatttctggactccactgttggaattaaagaaaaatctatttaccttcgcttatggaaaagaaaccactgtaatcacagggactaccagaatatttcaagaaatggtgcatcttcccgaaacctgaagaaatttatagaaagcttgtctagaaacaaggtgttggactatcccgccatcgttatatatgccatgattggaaatgatgtctgcagtgggaagagtgacccagtcccagccatgaccactcctgagaaactctactccaacgtcatgcagactctgaagcatctaaattcccacctgcccaatggcagccatgttattttgtatggcttaccagatggaacctttctctgggataatttgcacaacagatatcatcctctcggccagctaaataaagacatgacctatgcgcagttgtactccttcctgaactgcctccaggtcagcccctgccacggctggatgtcttccaacaagacgttgcggactctcacttcagagagagcagagcaactctccaacacactgaaaaaaattgcagccagtgagaaatttacaaacttcaatcttttctacatggattttgccttccatgaaatcatacaggagtggcagaagagaggcggacagccctggcagctcatcgagcccgtggatggattccaccccaacgaggtggctttgctgttgttggcggatcatttctggaaaaaggtgcagctccagtggccccaaatcctgggaaaggagaatccgttcaacccccagattaaacaggtgtttggagaccaaggcgggcactgagcctctcaggagcatgcacccctggggagcacagggaggcagaggcttgggtaaactcattccacaaaccctatgggggctgccacgtcacaggcccaaaggactcttcttcagcagcatctttgcaaaatgtctttctctcaatgaagagcatatctggacgactgtgcaatgctgtgtgctcccggggatcagtaacccttccgctgttcctgaaataacctttcataaagtgctttgggtgccattcca

SEQ ID NO: 2008 - protein, 575 aa, Homo sapien
MQSPWKILTVAPLFLLLSLQSSASPANDDQSRPSLSNGHTCVGCVLVVSVIEQLAQVHNSTVQASMERLCSYLPEKLFLKTTCYLVIDKFGSDIIKLLSADMNADVVCHTLEFCKQNTGQPLCHLYPLPKETWKFTLQKARQIVKKSPILKYSRSGSDICSLPVLAKICQKIKLAMEQSVPFKDVDSDKYSVFPTLRGYHWRGRDCNDSDESVYPGRRPNNWDVHQDSNCNGIWGVDPKDGVPYEKKFCEGSQPRGIILLGDSAGAHFHISPEWITASQMSLNSFINLPTALTNELDWPQLSGATGFLDSTVGIKEKSIYLRLWKRNHCNHRDYQNISRNGASSRNLKKFIESLSRNKVLDYPAIVIYAMIGNDVCSGKSDPVPAMTTPEKLYSNVMQTLKHLNSHLPNGSHVILYGLPDGTFLWDNLHNRYHPLGQLNKDMTYAQLYSFLNCLQVSPCHGWMSSNKTLRTLTSERAEQLSNTLKKIAASEKFTNFNLFYMDFAFHEIIQEWQKRGGQPWQLIEPVDGFHPNEVALLLLADHFWKKVQLQWPQILGKENPFNPQIKQVFGDQGGH

SEQ ID NO: 2009 - DNA, 1504 bp, Homo sapien
cctaagatgagctttccatgtaaatttgtagccagcttccttctgattttcaatgtttcttccaaaggtgcagtctccaaagagattacgaatgccttggaaacctggggtgccttgggtcaggacatcaacttggacattcctagttttcaaatgagtgatgatattgacgatataaaatgggaaaaaacttcagacaagaaaaagattgcacaattcagaaaagagaaagagactttcaaggaaaaagatacatataagctatttaaaaatggaactctgaaaattaagcatctgaagaccgatgatcaggatatctacaaggtatcaatatatgatacaaaaggaaaaaatgtgttggaaaaaatatttgatttgaagattcaagagagggtctcaaaaccaaagatctcctggacttgtatcaacacaaccctgacctgtgaggtaatgaatggaactgaccccgaattaaacctgtatcaagatgggaaacatctaaaactttctcagagggtcatcacacacaagtggaccaccagcctgagtgcaaaattcaagtgcacagcagggaacaaagtcagcaaggaatccagtgtcgagcctgtcagctgtccagagaaaggtctggacatctatctcatcattggcatatgtggaggaggcagcctcttgatggtctttgtggcactgctcgttttctatatcaccaaaaggaaaaaacagaggagtcggagaaatgatgaggagctggagacaagagcccacagagtagctactgaagaaaggggccggaagccccaacaaattccagcttcaacccctcagaatccagcaacttcccaacatcctcctccaccacctggtcatcgttcccaggcacctagtcatcgtcccccgcctcctggacaccgtgttcagcaccagcctcagaagaggcctcctgctccgtcgggcacacaagttcaccagcagaaaggcccgcccctccccagacctcgagttcagccaaaacctccccatggggcagcagaaaactcattgtccccttcctctaattaaaaaagatagaaactgtctttttcaataaaaagcactgtggatttctgccctcctgatgtgcatatccgtacttccatgaggtgttttctgtgtgcagaacattgtcacctcctgaggctgtgggccacagccacctctgcatcttcgaactcagccatgtggtcaacatctggagtttttggtctcctcagagagctccatcacaccagtaaggagaagcaatataagtgtgattgcaagaatggtagaggaccgagcacagaaatcttagagatttcttgtcccctctcaggtcatgtgtagatgcgataaatcaagtgattggtgtgcctgggtctcactacaagcagcctatctgcttaagagactctggagtttcttatgtgccctggtggacacttgcccaccatcctgtgagtaaaagtgaaataaaagctttgac

SEQ ID NO: 2010 - protein, 351 aa, Homo sapien
MSFPCKFVASFLLIFNVSSKGAVSKEITNALETWGALGQDINLDIPSFQMSDDIDDIKWEKTSDKKKIAQFRKEKETFKEKDTYKLFKNGTLKIKHLKTDDQDIYKVSIYDTKGKNVLEKIFDLKIQERVSKPKISWTCINTTLTCEVMNGTDPELNLYQDGKHLKLSQRVITHKWTTSLSAKFKCTAGNKVSKESSVEPVSCPEKGLDIYLIIGICGGGSLLMVFVALLVFYITKRKKQRSRRNDEELETRAHRVATEERGRKPQQIPASTPQNPATSQHPPPPPGHRSQAPSHRPPPPGHRVQHQPQKRPPAPSGTQVHQQKGPPLPRPRVQPKPPHGAAENSLSPSSN

SEQ ID NO: 2011 - DNA, 3260 bp, Homo sapien
ccatcccatagtgagggaagacacgcggaaacaggcttgcacccagacacgacaccatgcatctcctcggcccctggctcctgctcctggttctagaatacttggctttctctgactcaagtaaatgggtttttgagcaccctgaaaccctctacgcctgggagggggcctgcgtctggatcccctgcacctacagagccctagatggtgacctggaaagcttcatcctgttccacaatcctgagtataacaagaacacctcgaagtttgatgggacaagactctatgaaagcacaaaggatgggaaggttccttctgagcagaaaagggtgcaattcctgggagacaagaataagaactgcacactgagtatccacccggtgcacctcaatgacagtggtcagctggggctgaggatggagtccaagactgagaaatggatggaacgaatacacctcaatgtctctgaaaggccttttccacctcatatccagctccctccagaaattcaagagtcccaggaagtcactctgacctgcttgctgaatttctcctgctatgggtatccgatccaattgcagtggctcctagagggggttccaatgaggcaggctgctgtcacctcgacctccttgaccatcaagtctgtcttcacccggagcgagctcaagttctccccacagtggagtcaccatgggaagattgtgacctgccagcttcaggatgcagatgggaagttcctctccaatgacacggtgcagctgaacgtgaagcacaccccgaagttggagatcaaggtcactcccagtgatgccatagtgagggagggggactctgtgaccatgacctgcgaggtcagcagcagcaacccggagtacacgacggtatcctggctcaaggatgggacctcgctgaagaagcagaatacattcacgctaaacctgcgcgaagtgaccaaggaccagagtgggaagtactgctgtcaggtctccaatgacgtgggcccgggaaggtcggaagaagtgttcctgcaagtgcagtatgccccggaaccttccacggttcagatcctccactcaccggctgtggagggaagtcaagtcgagtttctttgcatgtcactggccaatcctcttccaacaaattacacgtggtaccacaatgggaaagaaatgcagggaaggacagaggagaaagtccacatcccaaagatcctcccctggcacgctgggacttattcctgtgtggcagaaaacattcttggtactggacagaggggcccgggagctgagctggatgtccagtatcctcccaagaaggtgaccacagtgattcaaaaccccatgccgattcgagaaggagacacagtgaccctttcctgtaactacaattccagtaaccccagtgttacccggtatgaatggaaaccccatggcgcctgggaggagccatcgcttggggtgctgaagatccaaaacgttggctgggacaacacaaccatcgcctgcgcacgttgtaatagttggtgctcgtgggcctcccctgtcgccctgaatgtccagtatgccccccgagacgtgagggtccggaaaatcaagcccctttccgagattcactctggaaactcggtcagcctccaatgtgacttctcaagcagccaccccaaagaagtccagttcttctgggagaaaaatggcaggcttctggggaaagaaagccagctgaattttgactccatctccccagaagatgctgggagttacagctgctgggtgaacaactccataggacagacagcgtccaaggcctggacacttgaagtgctgtatgcacccaggaggctgcgtgtgtccatgagcccgggggaccaagtgatggaggggaagagtgcaaccctgacctgtgagagtgacgccaaccctcccgtctcccactacacctggtttgactggaataaccaaagcctcccccaccacagccagaagctgagattggagccggtgaaggtccagcactcgggtgcctactggtgccaggggaccaacagtgtgggcaagggccgttcgcctctcagcacccttactgtctactatagcccggagaccatcggcaggcgagtggctgtgggactcgggtcctgcctcgccatcctcatcctggcaatctgtgggctcaagctccagcgacgttggaagaggacacagagccagcaggggcttcaggagaattccagcggccagagcttctttgtgaggaataaaaaggttagaagggcccccctctctgaaggcccccactccctgggatgctacaatccaatgatggaagatggcattagctacaccaccctgcgctttcccgagatgaacataccacgaactggagatgcagagtcctcagagatgcagagacctccccggacctgcgatgacacggtcacttattcagcattgcacaagcgccaagtgggcgactatgagaacgtcattccagattttccagaagatgaggggattcattactcagagctgatccagtttggggtcggggagcggcctcaggcacaagaaaatgtggactatgtgatcctcaaacattgacactggatgggctgcagcagaggcactgggggcagcgggggccagggaagtccccgagtttccccagacaccgccacatggcttcctcctgcgtgcatgtgcgcacacacacacacacacgcacacacacacacacacactcactgcggagaaccttgtgcctggctcagagccagtctttttggtgagggtaaccccaaacctccaaaactcctgcccctgttctcttccactctccttgctacccagaaatcatctaaatacctgccctgacatgcacacctcccctgccccaccagcccactggccatctccacccggagctgctgtgtcctctggatctgctcgtcattttccttcccttctccatctctctggccctctacccctgatctgacatccccactcacgaatattatgcccagtttctgcctctgagggaaagcccagaaaaggacagaaacgaagtagaaaggggcccagtcctggcctggcttctcctttggaagtgaggcattgcacggggagacgtacgtatcagcggccccttgactctggggactccgggtttgagatggacacactggtgtggattaacctgccagggagacagagctcacaataaaaatggctcagatgccacttcaaagaaaaaaaaaa

SEQ ID NO: 2012 - protein, 847 aa, Homo sapien
MHLLGPWLLLLVLEYLAFSDSSKWVFEHPETLYAWEGACVWIPCTYRALDGDLESFILFHNPEYNKNTSKFDGTRLYESTKDGKVPSEQKRVQFLGDKNKNCTLSIHPVHLNDSGQLGLRMESKTEKWMERIHLNVSERPFPPHIQLPPEIQESQEVTLTCLLNFSCYGYPIQLQWLLEGVPMRQAAVTSTSLTIKSVFTRSELKFSPQWSHHGKIVTCQLQDADGKFLSNDTVQLNVKHTPKLEIKVTPSDAIVREGDSVTMTCEVSSSNPEYTTVSWLKDGTSLKKQNTFTLNLREVTKDQSGKYCCQVSNDVGPGRSEEVFLQVQYAPEPSTVQILHSPAVEGSQVEFLCMSLANPLPTNYTWYHNGKEMQGRTEEKVHIPKILPWHAGTYSCVAENILGTGQRGPGAELDVQYPPKKVTTVIQNPMPIREGDTVTLSCNYNSSNPSVTRYEWKPHGAWEEPSLGVLKIQNVGWDNTTIACARCNSWCSWASPVALNVQYAPRDVRVRKIKPLSEIHSGNSVSLQCDFSSSHPKEVQFFWEKNGRLLGKESQLNFDSISPEDAGSYSCWVNNSIGQTASKAWTLEVLYAPRRLRVSMSPGDQVMEGKSATLTCESDANPPVSHYTWFDWNNQSLPHHSQKLRLEPVKVQHSGAYWCQGTNSVGKGRSPLSTLTVYYSPETIGRRVAVGLGSCLAILILAICGLKLQRRWKRTQSQQGLQENSSGQSFFVRNKKVRRAPLSEGPHSLGCYNPMMEDGISYTTLRFPEMNIPRTGDAESSEMQRPPRTCDDTVTYSALHKRQVGDYENVIPDFPEDEGIHYSELIQFGVGERPQAQENVDYVILKH

SEQ ID NO: 2013 - DNA, 1125 bp, Homo sapien
gtctcccccactgtcagcacctcttctgtgtggtgagtggaccgcttaccccactaggtgaagatgtcagcccaggagagctgcctcagcctcatcaagtacttcctcttcgttttcaacctcttcttcttcgtcctcggcagcctgatcttctgcttcggcatctggatcctcatcgacaagaccagcttcgtgtcctttgtgggcttggccttcgtgcctctgcagatctggtccaaagtcctggccatctcaggaatcttcaccatgggcatcgccctcctgggttgtgtgggggccctcaaggagctccgctgcctcctgggcctgtattttgggatgctgctgctcctgtttgccacacagatcaccctgggaatcctcatctccactcagcgggcccagctggagcgaagcttgcgggacgtcgtagagaaaaccatccaaaagtacggcaccaaccccgaggagaccgcggccgaggagagctgggactatgtgcagttccagctgcgctgctgcggctggcactacccgcaggactggttccaagtcctcatcctgagaggtaacgggtcggaggcgcaccgcgtgccctgctcctgctacaacttgtcggcgaccaacgactccacaatcctagataaggtgatcttgccccagctcagcaggcttggacacctggcgcggtccagacacagtgcagacatctgcgctgtccctgcagagagccacatctaccgcgagggctgcgcgcagggcctccagaagtggctgcacaacaaccttatttccatagtgggcatttgcctgggcgtcggcctactcgagctcgggttcatgacgctctcgatattcctgtgcagaaacctggaccacgtctacaaccggctcgctcgataccgttaggccccgccctccccaaagtcccgccccgcccccgtcacgtgcgctgggcacttccctgctgcctgtaaatatttgtttaatccccagttcgcctggagccctccgccttcacattcccctggggacccacgtggctgcgtgcccctgctgctgtcacctctcccacgggacctggggctttcgtccacagcttcctgtccccatctgtcggcctac

SEQ ID NO: 2014 - protein, 281 aa, Homo sapien
MSAQESCLSLIKYFLFVFNLFFFVLGSLIFCFGIWILIDKTSFVSFVGLAFVPLQIWSKVLAISGIFTMGIALLGCVGALKELRCLLGLYFGMLLLLFATQITLGILISTQRAQLERSLRDVVEKTIQKYGTNPEETAAEESWDYVQFQLRCCGWHYPQDWFQVLILRGNGSEAHRVPCSCYNLSATNDSTILDKVILPQLSRLGHLARSRHSADICAVPAESHIYREGCAQGLQKWLHNNLISIVGICLGVGLLELGFMTLSIFLCRNLDHVYNRLARYR

SEQ ID NO: 2015 - DNA, 1107 bp, Homo sapien
tgctgcaactcaaactaaccaacccactgggagaagatgcctgggggtccaggagtcctccaagctctgcctgccaccatcttcctcctcttcctgctgtctgctgtctacctgggccctgggtgccaggccctgtggatgcacaaggtcccagcatcattgatggtgagcctgggggaagacgcccacttccaatgcccgcacaatagcagcaacaacgccaacgtcacctggtggcgcgtcctccatggcaactacacgtggccccctgagttcttgggcccgggcgaggaccccaatggtacgctgatcatccagaatgtgaacaagagccatgggggcatatacgtgtgccgggtccaggagggcaacgagtcataccagcagtcctgcggcacctacctccgcgtgcgccagccgccccccaggcccttcctggacatgggggagggcaccaagaaccgaatcatcacagccgaggggatcatcctcctgttctgcgcggtggtgcctgggacgctgctgctgttcaggaaacgatggcagaacgagaagctcgggttggatgccggggatgaatatgaagatgaaaacctttatgaaggcctgaacctggacgactgctccatgtatgaggacatctcccggggcctccagggcacctaccaggatgtgggcagcctcaacataggagatgtccagctggagaagccgtgacacccctactcctgccaggctgcccccgcctgctgtgcacccagctccagtgtctcagctcacttccctgggacattctcctttcagcccttctgggggcttccttagtcatattcccccagtggggggtgggagggtaacctcactcttctccaggccaggcctccttggactcccctgggggtgtcccactcttcttccctctaaactgccccacctcctaacctaatccccacgccccgctgcctttcccaggctcccctcacccagcgggtaatgagcccttaatcgctgcctctaggggagctgattgtagcagcctcgttagtgtcaccccctcctccctgatctgtcagggccacttagtgataataaattcttcccaactgc

SEQ ID NO: 2016 - protein, 188 aa, Homo sapien
MPGGPGVLQALPATIFLLFLLSAVYLGPGCQALWMHKVPASLMVSLGEDAHFQCPHNSSNNANVTWWRVLHGNYTWPPEFLGPGEDPNEPPPRPFLDMGEGTKNRIITAEGIILLFCAVVPGTLLLFRKRWQNEKLGLDAGDEYEDENLYEGLNLDDCSMYEDISRGLQGTYQDVGSLNIGDVQLEKP

SEQ ID NO: 2017 - DNA, 3934 bp, Homo sapien
gccctcccagagctgccggacgctcgcgggtctcggaacgcatcccgccgcgggggcttcggccgtggcatgggcgccgcgggcctgctcggggttttcttggctctcgtcgcaccgggggtcctcgggatttcttgtggctctcctccgcctatcctaaatggccggattagttattattctacccccattgctgttggtaccgtgataaggtacagttgttcaggtaccttccgcctcattggagaaaaaagtctattatgcataactaaagacaaagtggatggaacctgggataaacctgctcctaaatgtgaatatttcaataaatattcttcttgccctgagcccatagtaccaggaggatacaaaattagaggctctacaccctacagacatggtgattctgtgacatttgcctgtaaaaccaacttctccatgaacggaaacaagtctgtttggtgtcaagcaaataatatgtgggggccgacacgactaccaacctgtgtaagtgttttccctctcgagtgtccagcacttcctatgatccacaatggacatcacacaagtgagaatgttggctccattgctccaggattgtctgtgacttacagctgtgaatctggttacttgcttgttggagaaaagatcattaactgtttgtcttcgggaaaatggagtgctgtcccccccacatgtgaagaggcacgctgtaaatctctaggacgatttcccaatgggaaggtaaaggagcctccaattctccgggttggtgtaactgcaaactttttctgtgatgaagggtatcgactgcaaggcccaccttctagtcggtgtgtaattgctggacagggagttgcttggaccaaaatgccagtatgtgaagaaattttttgcccatcacctccccctattctcaatggaagacatataggcaactcactagcaaatgtctcatatggaagcatagtcacttacacttgtgacccggacccagaggaaggagtgaacttcatccttattggagagagcactctccgttgtacagttgatagtcagaagactgggacctggagtggccctgccccacgctgtgaactttctacttctgcggttcagtgtccacatccccagatcctaagaggccgaatggtatctgggcagaaagatcgatatacctataacgacactgtgatatttgcttgcatgtttggcttcaccttgaagggcagcaagcaaatccgatgcaatgcccaaggcacatgggagccatctgcaccagtctgtgaaaaggaatgccaggcccctcctaacatcctcaatgggcaaaaggaagatagacacatggtccgctttgaccctggaacatctataaaatatagctgtaaccctggctatgtgctggtgggagaagaatccatacagtgtacctctgagggggtgtggacaccccctgtaccccaatgcaaagtggcagcgtgtgaagctacaggaaggcaactcttgacaaaaccccagcaccaatttgttagaccagatgtcaactcttcttgtggtgaagggtacaagttaagtgggagtgtttatcaggagtgtcaaggcacaattccttggtttatggagattcgtctttgtaaagaaatcacctgcccaccaccccctgttatctacaatggggcacacaccgggagttccttagaagattttccatatggaaccacggtcacttacacatgtaaccctgggccagaaagaggagtggaattcagcctcattggagagagcaccatccgttgtacaagcaatgatcaagaaagaggcacctggagtggccctgctcccctatgtaaactttccctccttgctgtccagtgctcacatgtccatattgcaaatggatacaagatatctggcaaggaagccccatatttctacaatgacactgtgacattcaagtgttatagtggatttactttgaagggcagtagtcagattcgttgcaaagctgataacacctgggatcctgaaataccagtttgtgaaaaagaaacatgccagcatgtgagacagagtcttcaagaacttccagctggttcacgtgtggagctagttaatacgtcctgccaagatgggtaccagttgactggacatgcttatcagatgtgtcaagatgctgaaaatggaatttggttcaaaaagattccactttgtaaagttattcactgtcaccctccaccagtgattgtcaatgggaagcacacagggatgatggcagaaaactttctatatggaaatgaagtctcttatgaatgtgaccaaggattctatctcctgggagagaaaaaattgcagtgcagaagtgattctaaaggacatggatcttggagcgggccttccccacagtgcttacgatctcctcctgtgactcgctgccctaatccagaagtcaaacatgggtacaagctcaataaaacacattctgcatattcccacaatgacatagtgtatgttgactgcaatcctggcttcatcatgaatggtagtcgcgtgattaggtgtcatactgataacacatgggtgccaggtgtgccaacttgtatgaaaaaagccttcatagggtgtccacctccgcctaagacccctaacgggaaccatactggtggaaacatagctcgattttctcctggaatgtcaatcctgtacagctgtgaccaaggctacctgctggtgggagaggcactccttctttgcacacatgagggaacctggagccaacctgcccctcattgtaaagaggtaaactgtagctcaccagcagatatggatggaatccagaaagggctggaaccaaggaaaatgtatcagtatggagctgttgtaactctggagtgtgaagatgggtatatgctggaaggcagtccccagagccagtgccaatcggatcaccaatggaaccctcccctggcggtttgcagatcccgttcacttgctcctgtcctttgtggtattgctgcaggtttgatacttcttaccttcttgattgtcattaccttatacgtgatatcaaaacacagagaacgcaattattatacagatacaagccagaaagaagcttttcatttagaagcacgagaagtatattctgttgatccatacaacccagccagctgatcagaagacaaactggtgtgtgcctcattgcttggaattcagcggaatattgattagaaagaaactgctctaatatcagcaagtctctttatatggcctcaagatcaatgaaatgatgtcataagcgatcacttcctatatgcacttattctcaagaagaacatctttatggtaaagatgggagcccagtttcactgccatatactcttcaaggactttctgaagcctcacttatgagatgcctgaagccaggccatggctataaacaattacatggctctaaaaagttttgccctttttaaggaaggcactaaaaagagctgtcctggtatctagacccatcttctttttgaaatcagcatactcaatgttactatctgcttttggttataatgtgtttttaattatctaaagtatgaagcattttctggggttatgatggccttacctttattaggaagtatggttttattttgatagtagcttcctcctctggtggtgttaatcatttcatttttacccttactgtttgagtttctctcacattactgtatatactttgcctttccataatcactcagtgattgcaatttgcacaagtttttttaaattatgggaatcaagatttaatcctagagatttggtgtacaattcaggctttggatgtttctttagcagttttgtgataagttctagttgcttgtaaaatttcacttaataatgtgtacattagtcattcaataaattgtaattgtaaagaaaa

SEQ ID NO: 2018 - protein, 1033 aa, Homo sapien
MGAAGLLGVFLALVAPGVLGISCGSPPPILNGRISYYSTPIAVGTVIRYSCSGTFRLIGEKSLLCITKDKVDGTWDKPAPKCEYFNKYSSCPEPIVPGGYKIRGSTPYRHGDSVTFACKTNFSMNGNKSVWCQANNMWGPTRLPTCVSVFPLECPALPMIHNGHHTSENVGSIAPGLSVTYSCESGYLLVGEKIINCLSSGKWSAVPPTCEEARCKSLGRFPNGKVKEPPILRVGVTANFFCDEGYRLQGPPSSRCVIAGQGVAWTKMPVCEEIFCPSPPPILNGRHIGNSLANVSYGSIVTYTCDPDPEEGVNFILIGESTLRCTVDSQKTGTWSGPAPRCELSTSAVQCPHPQILRGRMVSGQKDRYTYNDTVIFACMFGFTLKGSKQIRCNAQGTWEPSAPVCEKECQAPPNILNGQKEDRHMVRFDPGTSIKYSCNPGYVLVGEESIQCTSEGVWTPPVPQCKVAACEATGRQLLTKPQHQFVRPDVNSSCGEGYKLSGSVYQECQGTIPWFMEIRLCKEITCPPPPVIYNGAHTGSSLEDFPYGTTVTYTCNPGPERGVEFSLIGESTIRCTSNDQERGTWSGPAPLCKLSLLAVQCSHVHIANGYKISGKEAPYFYNDTVTFKCYSGFTLKGSSQIRCKADNTWDPEIPVCEKETCQHVRQSLQELPAGSRVELVNTSCQDGYQLTGHAYQMCQDAENGIWFKKIPLCKVIHCHPPPVIVNGKHTGMMAENFLYGNEVSYECDQGFYLLGEKKLQCRSDSKGHGSWSGPSPQCLRSPPVTRCPNPEVKHGYKLNKTHSAYSHNDIVYVDCNPGFIMNGSRVIRCHTDNTWVPGVPTCMKKAFIGCPPPPKTPNGNHTGGNIARFSPGMSILYSCDQGYLLVGEALLLCTHEGTWSQPAPHCKEVNCSSPADMDGIQKGLEPRKMYQYGAVVTLECEDGYMLEGSPQSQCQSDHQWNPPLAVCRSRSLAPVLCGIAAGLILLTFLIVITLYVISKHRERNYYTDTSQKEAFHLEAREVYSVDPYNPAS

SEQ ID NO: 2019 - DNA, 4512 bp, Homo sapien
cccagcccaagtttttagggtggggatccagactggttatacgtaccttcagtccttctcccagaggaaggcagaaacacctcaaagcctgcatgtaagaacatctactgagaaattattttaatcagacaccagctgagtgggagaaaggaaaagaacagagaagaacaaacaaaactcccttggtcttggatgtaagagaatccagcagagatggactggagtttcttcagagtagttgcagtgctgttcatttttctggtggtggtagaagttaacagtgaattccgaatccaggtaagagattataacactaaaaatggcaccatcaaatggcattcaatccgaaggcagaaacgtgaatggatcaagttcgcagcagcctgtcgtgaaggtgaagacaactcaaagaggaacccaatcgccaaaattcactcagattgtgctgcaaaccagcaagttacataccgcatctctggagtaggaattgatcagccaccatatgggatctttgtcattaatcagaaaactggtgaaattaatataacatccatagttgatcgagaggtcactcctttcttcattatctactgccgagctctgaactcaatgggccaagatttagagaggcctctagagctcagagtcagggttttggatataaatgacaaccctccagtgttttcaatggctacatttgcaggacaaatagaagaaaattctaatgcaaatacactggtgatgatactcaatgctactgacgcagatgaaccgaacaatttgaactcaaaaatagccttcaagattataagacaagaaccttcagattcaccaatgtttattatcaacagaaatactggagaaattcgaacgatgaataattttctagacagagagcaatacggccagtatgctcttgctgtaagaggctctgaccgagatggtggggcagatggcatgtcagcggaatgtgagtgcaacattaaaatcctcgatgtcaatgataatatcccttacatggaacagtcttcatataccatagaaattcaagaaaatactctaaattcaaatttgctcgagattagagtaattgatttggatgaagagttctcagctaactggatggcagtaattttctttatctctggaaatgaaggaaattggtttgagatagaaatgaatgaaagaacaaatgtgggaattttaaaggttgttaagcccttagattatgaagctatgcagagtctgcaactcagtattggtgtcagaaataaagctgaatttcatcattcaattatgtctcaatataaactgaaagcatctgcaatttctgtgactgtgttaaatgtaattgaaggcccagtgtttcgtccaggttcaaagacatatgttgtaactggtaatatgggatcaaatgataaagtgggagactttgtagctactgacctggacacaggtagaccttcaacgactgttaggtatgtaatgggaaataatccagctgacctgctagctgttgattcaagaacaggcaaactcactttgaaaaataaagttaccaaggaacagtacaatatgctcggaggaaaataccaaggaacgattctctctatagatgataatcttcaaagaacttgcactggtacaattaatattaacattcaaagttttggtaatgacgacaggactaatacagagccgaacactaaaattactaccaatactggcagacaagaaagtacttcttccactaactatgataccagcacaacttctactgactctagccaagtatattcttctgaacccggaaacggagccaaagatttgttatcagacaatgtacattttggtcctgctggcattggactcctcatcatgggattcttggtcttaggattggtcccatttttgatgatctgttgtgattgtggaggtgctcctcgtagtgcagctggctttgagcctgttcccgaatgttcagatggagcaattcattcatgggcagtagaaggaccacagcctgaacccagggatataaccactgtcataccacaaataccacctgataacgcaaatataattgaatgcattgacaactcaggagtttatacaaatgagtatggtggcagagaaatgcaagatctgggaggaggagagagaatgacaggatttgaactaacagagggagttaaaacttcaggaatgcctgagatatgtcaagaatactctggaacattaagaagaaattctatgagggaatgtagagaaggaggtctgaatatgaatttcatggaaagctacttctgtcagaaagcatatgcttacgcagatgaagatgaaggacgcccatctaatgactgtttgctcatatatgacatcgaaggtgtaggttcccctgctggctctgtgggttgttgtagcttcattggagaagacctggatgacagcttcttggataccctgggacctaaatttaagaagttggcagacatcagcctaggaaaagaatcatatccagaccttgatccttcttggccaccacaaagcactgaaccagtttgccttcctcaggaaacagagcccgttgttagtggacacccaccaatctccccacatttcggcactaccacagtaatttctgagagcacctatccctcgggacctggtgtactgcatcctaagcctattctcgatcctctgggctatggtaatgtcactgtgaccgagtcttacaccacctctgacactctgaagccctctgtgcacgttcacgataaccgaccagcatcaaacgtggtagtgacagagagagtggtcggcccaatctctggcgctgatttgcatggaatgttagagatgcctgacttgcgagatgggtcgaatgttatagtgacagaaagggtaatagcaccaagctctagtctacccacctctctgactatccatcatcctagagagtcttcaaatgtggtagtgacagaaagagtaatccaaccaacttccggcatgataggtagtctgagtatgcaccccgagttagccaatgcccacaatgtcattgtgacagagagggttgtttctggtgctggcgtaactggaattagtggcaccactgggatcagcggtggcataggcagcagtggcctggttggcaccagcatgggtgctgggagcggtgccctgagtggagctggcataagtggtggtggcattggcctgagcagcttgggagggacagccagcattggccacatgaggagttcctctgaccatcactttaaccaaaccattgggtccgcctcccctagcacagctcgaagtcgaatcacaaagtatagtaccgtgcaatatagcaagtagtcaggaccccagctcactttttcatagtcattgtggtttagatccaattcccaccactaaaaaactaacaatgtgatttataacgcacaacttcgtgctcaggtcatctaggagcaaggtgagaaatcacaatgagaaaaataaatggaaacaccactgctaggggagagctctccttagcattcataaacttttctcttatattaggactaaggaactaaaacttgaggcagagtcttctttgtgcctgagtggcctgtagtccatctccagcatgtaactggccttacgatggcaattggcatcattctccttgctctgttttgcttttccatatagctcgagcaaaattcaaaaagaactaaatatgcaatatatgttcatatctatgggaaaaatctaaaatgtgtgccagatgccctgttggtttcacagataacataaataaaaattcaaccacagatttatacaagggttaaccattttttttaagtttgactacatagtcaagtccacaagccatcaagcactcctaccttaattattgcactagagaaaataaattccaaattaggaagtgtttcctaggaggaaaattccattagagagtggcaataggatgaggtttcttcagggtaaactagcaatgcctgagcctgaaccttaatgtggggcctcagttaatatccctgtggagtcaaggattcttctgattctagtgtgtgtttagtgatagatgtagtcttgacgaatattgcttactggtgaggttgaggaatatcacactcgtctttccctttaccactgtggttttgacttaagaaagcaaaactcactaagtttacttctcgaattgaagcaagtgaggcctgacatggttgtcatcactagtggcaaatgaccttccaagtaagcagatgggaactgaattgtgttttcaggttttgtttttagtaggtgatattcattcgtatccagctctttattacatagctctgaagttaaaatgatttacataggccgagctgtggacaaaaaaaaagaagcagcagcttgtagtatgcttaagctttggggaatttttttttaaggggatctaaaaaaatgtttttagaacatgtaaaatgtttaatggtgaaagttggaaaa

SEQ ID NO: 2020 - protein, 1049 aa, Homo sapien
MDWSFFRVVAVLFIFLVVVEVNSEFRIQVRDYNTKNGTIKWHSIRRQKREWIKFAAACREGEDNSKRNPIAKIHSDCAANQQVTYRISGVGIDQPPYGIFVINQKTGEINITSIVDREVTPFFIIYCRALNSMGQDLERPLELRVRVLDINDNPPVFSMATFAGQIEENSNANTLVMILNATDADEPNNLNSKIAFKIIRQEPSDSPMFIINRNTGEIRTMNNFLDREQYGQYALAVRGSDRDGGADGMSAECECNIKILDVNDNIPYMEQSSYTIEIQENTLNSNLLEIRVIDLDEEFSANWMAVIFFISGNEGNWFEIEMNERTNVGILKVVKPLDYEAMQSLQLSIGVRNKAEFHHSIMSQYKLKASAISVTVLNVIEGPVFRPGSKTYVVTGNMGSNDKVGDFVATDLDTGRPSTTVRYVMGNNPADLLAVDSRTGKLTLKNKVTKEQYNMLGGKYQGTILSIDDNLQRTCTGTININIQSFGNDDRTNTEPNTKITTNTGRQESTSSTNYDTSTTSTDSSQVYSSEPGNGAKDLLSDNVHFGPAGIGLLIMGFLVLGLVPFLMICCDCGGAPRSAAGFEPVPECSDGAIHSWAVEGPQPEPRDITTVIPQIPPDNANIIECIDNSGVYTNEYGGREMQDLGGGERMTGFELTEGVKTSGMPEICQEYSGTLRRNSMRECREGGLNMNFMESYFCQKAYAYADEDEGRPSNDCLLIYDIEGVGSPAGSVGCCSFIGEDLDDSFLDTLGPKFKKLADISLGKESYPDLDPSWPPQSTEPVCLPQETEPVVSGHPPISPHFGTTTVISESTYPSGPGVLHPKPILDPLGYGNVTVTESYTTSDTLKPSVHVHDNRPASNVVVTERVVGPISGADLHGMLEMPDLRDGSNVIVTERVIAPSSSLPTSLTIHHPRESSNVVVTERVIQPTSGMIGSLSMHPELANAHNVIVTERVVSGAGVTGISGTTGISGGIGSSGLVGTSMGAGSGALSGAGISGGGIGLSSLGGTASIGHMRSSSDHHFNQTIGSASPSTARSRITKYSTVQYSK

SEQ ID NO: 2021 - DNA, 1600 bp, Homo sapien
gccccgccgccggcagtggaccgctgtgcgcgaaccctgaaccctacggtcccgacccgcgggcgaggccgggtacctgggctgggatccggagcaagcgggcgagggcagcgccctaagcaggcccggagcgatggcagccttgatgaccccgggaaccggggccccacccgcgcctggtgacttctccggggaagggagccagggacttcccgacccttcgccagagcccaagcagctcccggagctgatccgcatgaagcgagacggaggccgcctgagcgaagcggacatcaggggcttcgtggccgctgtggtgaatgggagcgcgcagggcgcacagatcggggccatgctgatggccatccgacttcggggcatggatctggaggagacctcggtgctgacccaggccctggctcagtcgggacagcagctggagtggccagaggcctggcgccagcagcttgtggacaagcattccacagggggtgtgggtgacaaggtcagcctggtcctcgcacctgccctggcggcatgtggctgcaaggtgccaatgatcagcggacgtggtctggggcacacaggaggcaccttggataagctggagtctattcctggattcaatgtcatccagagcccagagcagatgcaagtgctgctggaccaggcgggctgctgtatcgtgggtcagagtgagcagctggttcctgcggacggaatcctatatgcagccagagatgtgacagccaccgtggacagcctgccactcatcacagcctccattctcagtaagaaactcgtggaggggctgtccgctctggtggtggacgttaagttcggaggggccgccgtcttccccaaccaggagcaggcccgggagctggcaaagacgctggttggcgtgggagccagcctagggcttcgggtcgcggcagcgctgaccgccatggacaagcccctgggtcgctgcgtgggccacgccctggaggtggaggaggcgctgctctgcatggacggcgcaggcccgccagacttaagggacctggtcaccacgctcgggggcgccctgctctggctcagcggacacgcggggactcaggctcagggcgctgcccgggtggccgcggcgctggacgacggctcggcccttggccgcttcgagcggatgctggcggcgcagggcgtggatcccggtctggcccgagccctgtgctcgggaagtcccgcagaacgccggcagctgctgcctcgcgcccgggagcaggaggagctgctggcgcccgcagatggcaccgtggagctggtccgggcgctgccgctggcgctggtgctgcacgagctcggggccgggcgcagccgcgctggggagccgctccgcctgggggtgggcgcagagctgctggtcgacgtgggtcagaggctgcgccgtgggaccccctggctccgcgtgcaccgggacggccccgcgctcagcggcccgcagagccgcgccctgcaggaggcgctcgtactctccgaccgcgcgccattcgccgccccctcgcccttcgcagagctcgttctgccgccgcagcaataaagctcctttgccgcgaaa

SEQ ID NO: 2022 - protein, 482 aa, Homo sapien
MAALMTPGTGAPPAPGDFSGEGSQGLPDPSPEPKQLPELIRMKRDGGRLSEADIRGFVAAVVNGSAQGAQIGAMLMAIRLRGMDLEETSVLTQALAQSGQQLEWPEAWRQQLVDKHSTGGVGDKVSLVLAPALAACGCKVPMISGRGLGHTGGTLDKLESIPGFNVIQSPEQMQVLLDQAGCCIVGQSEQLVPADGILYAARDVTATVDSLPLITASILSKKLVEGLSALVVDVKFGGAAVFPNQEQARELAKTLVGVGASLGLRVAAALTAMDKPLGRCVGHALEVEEALLCMDGAGPPDLRDLVTTLGGALLWLSGHAGTQAQGAARVAAALDDGSALGRFERMLAAQGVDPGLARALCSGSPAERRQLLPRAREQEELLAPADGTVELVRALPLALVLHELGAGRSRAGEPLRLGVGAELLVDVGQRLRRGTPWLRVHRDGPALSGPQSRALQEALVLSDRAPFAAPSPFAELVLPPQQ

SEQ ID NO: 2023 - DNA, 1358 bp, Homo sapien
cctgtttgggacactggactcccgtgagctggaaggaacagatttaatatctaggggctgggtatccccacatcactcatttggggggtcaagggacccgggcaatatagtattctgctcagtgtctggagatcatctacccaggctggggcttctgggacaggcgaggacccacggaccctggaagagctggtccaggggactgaactcccggcatctttacagagcagagcatgatcacattcctgccgctgctgctggggctcagcctgggctgcacaggagcaggtggcttcgtggcccatgtggaaagcacctgtctgttggatgatgctgggactccaaaggatttcacatactgcatctccttcaacaaggatctgctgacctgctgggatccagaggagaataagatggccccttgcgaatttggggtgctgaatagcttggcgaatgtcctctcacagcacctcaaccaaaaagacaccctgatgcagcgcttgcgcaatgggcttcagaattgtgccacacacacccagcccttctggggatcactgaccaacaggacacggccaccatctgtgcaagtagccaaaaccactccttttaacacgagggagcctgtgatgctggcctgctatgtgtggggcttctatccagcagaagtgactatcacgtggaggaagaacgggaagcttgtcatgcctcacagcagtgcgcacaagactgcccagcccaatggagactggacataccagaccctctcccatttagccttaaccccctcttacggggacacttacacctgtgtggtagagcacattggggctcctgagcccatccttcgggactggacacctgggctgtcccccatgcagaccctgaaggtttctgtgtctgcagtgactctgggcctgggcctcatcatcttctctcttggtgtgatcagctggcggagagctggccactctagttacactcctcttcctgggtccaattattcagaaggatggcacatttcctagaggcagaatcctacaacttccactccaagtgagaaggagattcaaactcaatgatgctaccatgcctctccaacatcttcaaccccctgacattatcttggatcctatggtttctccatccaattctttgaatttcccagtctcccctatgtaaaacttagcaacttgggggacctcattcctgggactatgctgtaaccaaattattgtccaaggctatatttctgggatgaatataatctgaggaagggagttaaagaccctcctggggctctcagtgtgccatagaggacagcaactggtgattgtttcagagaaataaactttggtgga

SEQ ID NO: 2024 - protein, 263 aa, Homo sapien
MITFLPLLLGLSLGCTGAGGFVAHVESTCLLDDAGTPKDFTYCISFNKDLLTCWDPEENKMAPCEFGVLNSLANVLSQHLNQKDTLMQRLRNGLQNCATHTQPFWGSLTNRTRPPSVQVAKTTPFNTREPVMLACYVWGFYPAEVTITWRKNGKLVMPHSSAHKTAQPNGDWTYQTLSHLALTPSYGDTYTCVVEHIGAPEPILRDWTPGLSPMQTLKVSVSAVTLGLGLIIFSLGVISWRRAGHSSYTPLPGSNYSEGWHIS

SEQ ID NO: 2025 - DNA, 715 bp, Homo sapien
gaagtcgcaccatgtccatgtcacccacggtcatcatcctggcatgtcttgggttcttcttggaccagagtgtgtgggcacacgtgggtctatatgagaaaccttcgcttacagcccggccgggccccacggttcgcgcaggagagaacgtgaccttgtcctgcagctcccagagctcctttgacatctaccatctatccagggaaggggaagcccatgaacttaggctccctgcagtgcccagcatcaatggaacattccaggccgacttccctctgggtcctgccacccacggagagacctacagatgcttcggctctttccatggatctccctacgagtggtcagacccgagtgacccactgcctgtttctgtcacagatgctgctgtaatgaaccaagagcctgcgggacacagaacagtgaacagggaggactctgatgaacaagaccctcaggaggtgacatacgcacagttggatcactgcattttcacacagagaaaaatcactggcccttctcagaggagcaagagaccttcaacagataccagcgtgtgtatagaacttccaaatgctgagcccagagcgttgtctcctgcccatgagcaccacagtcaggccttgatgggatcttctagggagacaacagccctgtctcaaacccagcttgccagctctaatgtaccagcagctggaatctgaaggcgtgagtc

SEQ ID NO: 2026 - protein, 230 aa, Homo sapien
MSMSPTVIILACLGFFLDQSVWAHVGLYEKPSLTARPGPTVRAGENVTLSCSSQSSFDIYHLSREGEAHELRLPAVPSINGTFQADFPLGPATHGETYRCFGSFHGSPYEWSDPSDPLPVSVTDAAVMNQEPAGHRTVNREDSDEQDPQEVTYAQLDHCIFTQRKITGPSQRSKRPSTDTSVCIELPNAEPRALSPAHEHHSQALMGSSRETTALSQTQLASSNVPAAGI

SEQ ID NO: 2027 - DNA, 1466 bp, Homo sapien
cttagtaacacgttgatgagaaatctactttttccactcttgactcactctgagccttcacagggcagtctgcgaagattgcaggcattgtttgttcttgtcttggatttatgcctttaaatttcaccttttattacacagctatagcaggcctttttatgagactaacctggcctctccactaaaggatgtgtgactttctggggacagaagagtacagtccctgacatcacacactgcagagatggataaccaaggagtaatctactcagacctgaatctgcccccaaacccaaagaggcagcaacgaaaacctaaaggcaataaaagctccattttagcaactgaacaggaaataacctatgcggaattaaaccttcaaaaagcttctcaggattttcaagggaatgacaaaacctatcactgcaaagatttaccatcagctccagagaagctcattgttgggatcctgggaattatctgtcttatcttaatggcctctgtggtaacgatagttgttattccctctacattaatacagaggcacaacaattcttccctgaatacaagaactcagaaagcacgtcattgtggccattgtcctgaggagtggattacatattccaacagttgttactacattggtaaggaaagaagaacttgggaagagagtttgctggcctgtacttcgaagaactccagtctgctttctatagataatgaagaagaaatgaaatttctgtccatcatttcaccatcctcatggattggtgtgtttcgtaacagcagtcatcatccatgggtgacaatgaatggtttggctttcaaacatgagataaaagactcagataatgctgaacttaactgtgcagtgctacaagtaaatcgacttaaatcagcccagtgtggatcttcaataatatatcattgtaagcataagctttagaggtaaagcgtttgcatttgcagtgcatcagataaattgtatatttcttaaaatagaaatatattatgattgcataaatcttaaaatgaattatgttatttgctctaataagaaaattctaaatcaattattgaaacaggatacacacaattactaaagtacagacatcctagcatttgtgtcgggctcattttgctcaacatggtatttgtggttttcagcctttctaaaagttgcatgttatgtgagtcagcttataggaagtaccaagaacagtcaaacccatggagacagaaagtagaatagtggttgccaatgtctgagggaggttgaaataggagatgacctctaactgatagaacgttactttgtgtcgtgatgaaaactttctaaatttcagtagtggtgatggttgtaactctgcgaatatactaaacatcattgatttttaatcattttaagtgcatgaaatgtatgctttgtacacgacacttcaataaagctatccagaaaaaaaaaa

SEQ ID NO: 2028 - protein, 215 aa, Homo sapien
MDNQGVIYSDLNLPPNPKRQQRKPKGNKSSILATEQEITYAELNLQKASQDFQGNDKTYHCKDLPSAPEKLIVGILGIICLILMASVVTIVVIPSRHCGHCPEEWITYSNSCYYIGKERRTWEESLLACTSKNSSLLSIDNEEEMKFLSIISPSSWIGVFRNSSHHPWVTMNGLAFKHEIKDSDNAELNCAVLQVNRLKSAQCGSSIIYHCKHKL

SEQ ID NO: 2029 - DNA, 3207 bp, Homo sapien; identical to SEQ ID NO: 760

SEQ ID NO: 2030 - protein, 876 aa, Homo sapien; identical to SEQ ID NO: 761

SEQ ID NO: 2031 - DNA, 1604 bp, Homo sapien
  Unsure 1530: Unknown base
gggcgtgatttgagccccgtttttattttctgtgagccacgtcctcctcgagggggtcaatctggccaaaaggagtgatgcgcttcgcctggaccgtgctcctgctcgggcctttgcagctctgcgcgctagtgcactgcgcccctcccgccgccggccaacagcagcccccgcgcgagccgccggcggctccgggcgcctggcgccagcagatccaatgggagaacaacgggcaggtgttcagcttgctgagcctgggctcacagtaccagcctcagcgccgccgggacccgggcgccgccgtccctggtgcagccaacgcctccgcccagcagccccgcactccgatcctgctgatccgcgacaaccgcaccgccgcggcgcgaacgcggacggccggctcatctggagtcaccgctggccgccccaggcccaccgcccgtcactggttccaagctggctactcgacatctagagcccgcgaacgtggcgcctcgcgcgcggagaaccagacagcgccgggagaagttcctgcgctcagtaacctgcggccgcccagccgcgtggacggcatggtgggcgacgacccttacaacccctacaagtactctgacgacaacccttattacaactactacgatacttatgaaaggcccagacctgggggcaggtaccggcccggatacggcactggctacttccagtacggtctcccagacctggtggccgacccctactacatccaggcgtccacgtacgtgcagaagatgtccatgtacaacctgagatgcgcggcggaggaaaactgtctggccagtacagcatacagggcagatgtcagagattatgatcacagggtgctgctcagatttccccaaagagtgaaaaaccaagggacatcagatttcttacccagccgaccaagatattcctgggaatggcacagttgtcatcaacattaccacagtatggatgagtttagccactatgacctgcttgatgccaacacccagaggagagtggctgaaggccacaaagcaagtttctgtcttgaagacacatcctgtgactatggctaccacaggcgatttgcatgtactgcacacacacagggattgagtcctggctgttatgatacctatggtgcagacatagactgccagtggattgatattacagatgtaaaacctggaaactatatcctaaaggtcagtgtaaaccccagctacctggttcctgaatctgactataccaacaatgttgtgcgctgtgacattcgctacacaggacatcatgcgtatgcctcaggctgcacaatttcaccgtattagaaggcaaagcaaaactcccaatggataaatcagtgcctggtgttctgaagtgggaaaaaatagactaacttcagtaggatttatgtattttgaaaaagagaacagaaaacaacaaaagaatttttgtttggactgttttcaataacaaagcacataactggattttgaacgcttaagtcaatcattacttggaaatttntaatgtttattatttacatcaactttgtgaattaacacagtgtttcaattctgtaatttcatatttgactcttt

SEQ ID NO: 2032 - protein, 417 aa, Homo sapien [sequence omitted]

SEQ ID NO: 2033 - DNA, 894 bp, Homo sapien
cagtctcaatgggggcactggggctggagggcaggggtgggaggctccaggggaggggttccctcctgctagctgtggcaggagccacttctctggtgaccttgttgctggcggtgcctatcactgtcctggctgtgctggccttagtgccccaggatcagggaggactggtaacggagacggccgaccccggggcacaggcccagcaaggactggggtttcagaagctgccagaggaggagccagaaacagatctcagccccgggctcccagctgcccacctcataggcgctccgctgaaggggcaggggctaggctgggagacgacgaaggaacaggcgtttctgacgagcgggacgcagttctcggacgccgaggggctggcgctcccgcaggacggcctctattacctctactgtctcgtcggctaccggggccgggcgccccctggcggcggggacccccagggccgctcggtcacgctgcgcagctctctgtaccgggcggggggcgcctacgggccgggcactcccgagctgctgctcgagggcgccgagacggtgactccagtgctggacccggccaggagacaagggtacgggcctctctggtacacgagcgtggggttcggcggcctggtgcagctccggaggggcgagagggtgtacgtcaacatcagtcaccccgatatggtggacttcgcgagagggaagaccttctttggggccgtgatggtggggtgagggaatatgagtgcgtggtgcgagtgcgtgaatattgggggcccggacgcccaggaccccatggcagtgggaaaaatgtaggagactgtttggaaattgattttgaacctgatgaaaataaagaatggaaagcttcagtgctgccgataaa

SEQ ID NO: 2034 - protein, 77 aa, Homo sapien
MGALGLEGRGGRLQGRGSLLLAVAGATSLVTLLLAVPITVLAVLALVPQDQGGLGFRSCQRRSQKQISAPGSQLPTS

SEQ ID NO: 2035 - DNA, 2476 bp, Homo sapien
cggccagcacaccccggcacctcctctgcggcagctgcgcctcgcaagcgcagtgccgcagcgcacgccggagtggctgtagctgcctcggcgcggctgccgccctgcgcgggctgtgggctgcgggctgcgcccccgctgctggccagctctgcacggctgcgggctctgcggcgcccggtgctctgcaacgctgcggcgggcggcatgggataacgcggccatggtgcgccgagatcgcctccgcaggatgagggagtggtgggtccaggtggggctgctggccgtgcccctgcttgctgcgtacctgcacatcccaccccctcagctctcccctgcccttcactcatggaagtcttcaggcaagtttttcacttacaagggactgcgtatcttctaccaagactctgtgggtgtggttggaagtccagagatagttgtgcttttacacggttttccaacatccagctacgactggtacaagatttggaagggtctgaccttgaggtttcatcgggtgattgcccttgatttcttaggctttggcttcagtgacaaaccgagaccacatcactattccatatttgagcaggccagcatcgtggaagcgcttttgcggcatctggggctccagaaccgcagaatcaaccttctttctcatgactatggagatattgttgctcaggagcttctctacaggtacaagcagaatcgatctggtcggcataccataaagagtctctgtctgtcaaatggaggtatctttcctgagactcaccgtccactccttctccaaaagctactcaaagatggaggtgtgctgtcacccatcctcacacgactgatgaacttctttgtattctctcgaggtctcaccccagtctttgggccgtatactcggccctctgagagtgagctgtgggacatgtgggcagggatccgcaacaatgacgggaacttagtcattgacagtctcttacagtacatcaatcagaggaagaagttcagaaggcgctgggtgggagctcttgcctctgtaactatccccattcattttatctatgggccattggatcctgtaaatccctatccagagtttttggagctgtacaggaaaacgctgccgcggtccacagtgtcgattctggatgaccacattagccactatccacagctagaggatcccatgggcttcttgaatgcatatatgggcttcatcaactccttctgagctggaaagagtagcttccctgtattacctcccctactcccttatgtgttgtgtattccacttaggaagaaatgcccaaaagaggtcctggccatcaaacataattctctcacaaagtccactttactcaaattggtgaacagtgtataggaagaagccagcaggagctctgactaaggttgacataatagtccacctcccattactttgatatctgatcaaatgtatagacttggctttgttttttgtgctattaggaaattctgatgagcattactattcactgatgcagaaagacgttcttttgcataaaagacttttttttaacactttggacttctctgaaatatttagaagtgctaatttctggcccacccccaacaggaattctatagtaaggaggaggagaaggggggctccttccctctcctcgaatgacgttatgggcacatgccttttaaaagttctttaagcaacacagagctgagtcctctttgtcatacctttggatttagtgtttcatcagctgtttttagttataaacattttgttaaaatagatattggtttaaatgatacagtattttaggtatgatttaagactatgatttacctatacattatatatattttataaagatactaaaccagcatacccttactctgccagagtagtgaagctaattaaacacgtttggtttctgaataaattgaactaaatccaaactatttcctaaaatcacaggacattaaggaccaatagcatctgtgccagagatgtactgttattagctgggaagaccaattctaacagcaaataacagtctgagactcctcatacctcagtggttagaagcatgtctctcttgagctacagtagaggggaagggattgttgtgtagtcaagtcaccatgctgaatgtacactgattcctttatgatgactgcttaactccccactgcctgtcccagagaggctttccaatgtagctcagtaattcctgttactttacagacaggaaagttccagaaactttaagaacaaactctgaaagacctatgagcaaatggtgctgaatactttttttttaaagccacatttcattgtcttagtcaaagcaggattattaagtgattatttaaaattcgtttttttaaattagcaacttcaagtataacaactttgaaactggaataagtgtttattttctattaataaaaatgaattgtgacaaaaaaaaaaccg

SEQ ID NO: 2036 - protein, 335 aa, Homo sapien
MVRRDRLRRMREWWVQVGLLAVPLLAAYLHIPPPQLSPALHSWKSSGKFFTYKGLRIFYQDSVGVVGSPEIVVLLHGFPTSSYDWYKIWKGLTLRFHRVIALDFLGFGFSDKPRPHHYSIFEQASIVEALLRHLGLQNRRINLLSHDYGDIVAQELLYRYKQNRSGRHTIKSLCLSNGGIFPETHRPLLLQKLLKDGGVLSPILTRLMNFFVFSRGLTPVFGPYTRPSESELWDMWAGIRNNDGNLVIDSLLQYINQRKKFRRRWVGALASVTIPIHFIYGPLDPVNPYPEFLELYRKTLPRSTVSILDDHISHYPQLEDPMGFLNAYMGFINSF

SEQ ID NO: 2037 - DNA, 1905 bp, Homo sapien
gaggcgccaggatcagtcggggcacccgcagcgcaggctgccacccacctgggcgacctccgcggcggcggcggcggcggctgggtagagtcagggccgggggcgcacgccggaacacctgggccgccgggcaccgagcgtcggggggctgcgcggcgcgaccctggagagggcgcagccgatgcgggcggcggcggcggcggggggcgtgcggacggccgcgctggcgctgctgctgggggcgctgcactgggcgccggcgcgctgcgaggagtacgactactatggctggcaggccgagccgctgcacggccgctcctactccaagccgccgcagtgccttgacatccctgccgacctgccgctctgccacacggtgggctacaagcgcatgcggctgcccaacctgctggagcacgagagcctggccgaagtgaagcagcaggcgagcagctggctgccgctgctggccaagcgctgccactcggatacgcaggtcttcctgtgctcgctctttgcgcccgtctgtctcgaccggcccatctacccgtgccgctcgctgtgcgaggccgtgcgcgccggctgcgcgccgctcatggaggcctacggcttcccctggcctgagatgctgcactgccacaagttccccctggacaacgacctctgcatcgccgtgcagttcgggcacctgcccgccaccgcgcctccagtgaccaagatctgcgcccagtgtgagatggagcacagtgctgacggcctcatggagcagatgtgctccagtgactttgtggtcaaaatgcgcatcaaggagatcaagatagagaatggggaccggaagctgattggagcccagaaaaagaagaagctgctcaagccgggccccctgaagcgcaaggacaccaagcggctggtgctgcacatgaagaatggcgcgggctgcccctgcccacagctggacagcctggcgggcagcttcctggtcatgggccgcaaagtggatggacagctgctgctcatggccgtctaccgctgggacaagaagaataaggagatgaagtttgcagtcaaattcatgttctcctacccctgctccctctactaccctttcttctacggggcggcagagccccactgaagggcactcctccttgccctgccagctgtgccttgcttgccctctggccccgccccaacttccaggctgacccggccctactggagggtgttttcacgaatgttgttactggcacaaggcctaagggatgggcacggagcccaggctgtcctttttgacccaggggtcctggggtccctgggatgttgggcttcctctctcaggagcagggcttcttcatctgggtgaagacctcagggtctcagaaagtaggcaggggaggagagggtaagggaaaggtggaggggctcagggcaccctgaggcggaggtttcagagtagaaggtgatgtcagctccagctcccctctgtcggtggtggggcctcaccttgaagagggaagtctcaatattaggctaagctatttgggaaagttctccccaccgcccctgtacgcgtcatcctagccccccttaggaaaggagttagggtctcagtgcctccagccacaccccctgccttccccagcttgcccatttccctgccccaaggcccagagctccccccagactggagagcaagcccagcccagcctcggcatagacccccttctggtccgcccgtggctcgattcccgggattcattcctcagcctctgcttctcccttttatcccaataagttattgctactgctgtgaggccataggtactagacaaccaatacatgcagggttgggttttctaatttttttaactttttaattaaatcaaaggtcgacgcgcggccgcg

SEQ ID NO: 2038 - protein, 317 aa, Homo sapien
MRAAAAAGGVRTAALALLLGALHWAPARCEEYDYYGWQAEPLHGRSYSKPPQCLDIPADLPLCHTVGYKRMRLPNLLEHESLAEVKQQASSWLPLLAKRCHSDTQVFLCSLFAPVCLDRPIYPCRSLCEAVRAGCAPLMEAYGFPWPEMLHCHKFPLDNDLCIAVQFGHLPATAPPVTKICAQCEMEHSADGLMEQMCSSDFVVKMRIKEIKIENGDRKLIGAQKKKKLLKPGPLKRKDTKRLVLHMKNGAGCPCPQLDSLAGSFLVMGRKVDGQLLLMAVYRWDKKNKEMKFAVKFMFSYPCSLYYPFFYGAAEPH

SEQ ID NO: 2039 - DNA, 3410 bp, Homo sapien
tgcgacgtgactggctagctgcgtgggtactggaacaagcaaacgaggcagcgagcgaaggacgggagccggaccctgggccccgtggaactccagcctgcgccaccacgtcacgcacacgctcggcgctgcgatccgcgcatataacgatatttggatttgacctgcattttggaatttatctacacttaaaatgccaccagcagttggaggtccagttggatacacccccccagatggaggctggggctgggcagtggtaattggagctttcatttccatcggcttctcttatgcatttcccaaatcaattactgtcttcttcaaagagattgaaggtatattccatgccaccaccagcgaagtgtcatggatatcctccataatgttggctgtcatgtatggtggaggtcctatcagcagtatcctggtgaataaatatggaagtcgtatagtcatgattgttggtggctgcttgtcaggctgtggcttgattgcagcttctttctgtaacaccgtacagcaactatacgtctgtattggagtcattggaggtcttgggcttgccttcaacttgaatccagctctgaccatgattggcaagtatttctacaagaggcgaccattggccaacggactggccatggcaggcagccctgtgttcctctgtactctggcccccctcaatcaggttttcttcggtatctttggatggagaggaagctttctaattcttgggggcttgctactaaactgctgtgttgctggagccctcatgcgaccaatcgggcccaagccaaccaaggcagggaaagataagtctaaagcatcccttgagaaagctggaaaatctggtgtgaaaaaagatctgcatgatgcaaatacagatcttattggaagacaccctaaacaagagaaacgatcagtcttccaaacaattaatcagttcctggacttaaccctattcacccacagaggctttttgctatacctctctggaaatgtgatcatgttttttggactctttgcacctttggtgtttcttagtagttatgggaagagtcagcattattctagtgagaagtctgccttccttctttccattctggcttttgttgacatggtagcccgaccatctatgggacttgtagccaacacaaagccaataagacctcgaattcagtatttctttgcggcttccgttgttgcaaatggagtgtgtcatatgctagcacctttatccactacctatgttggattctgtgtctatgcgggattctttggatttgccttcgggtggctcagctccgtattgtttgaaacattgatggaccttgttggaccccagaggttctccagcgctgtgggattggtgaccattgtggaatgctgtcctgtcctcctggggccaccacttttaggtcggctcaatgacatgtatggagactacaaatacacatactgggcatgtggcgtcgtcctaattatttcaggtatctatctcttcattggcatgggcatcaattatcgacttttggcaaaagaacagaaagcaaacgagcagaaaaaggaaagtaaagaggaagagaccagtatagatgttgctgggaagccaaatgaagttaccaaagcagcagaatctccggaccagaaagacacagaaggagggcccaaggaggaggaaagtccagtctgaatccatggggctgaagggtaaattgagcagttcatgacccaggatatctgaaaatattctactggcctgtaatctaccagtggtgctcaatgcaaatagtagacatttgtgtggaaatcataccagttgttcattgatgggatttttgtttgactccttaccaatagcctgaatttgaggagggaatgattggtagcaaaggatgggggaaagaagtaggttctgttttgttttgttttaatcttagcttttaatagtgtcataaagattataatatgtgccttaagttttagtctttagaactctagagagccttaacttcttaaaccatttttgctgaattcatctatttcgagtgttgtgttaaaaggaaaaataacaactaacttgtttgaggcaaatctaaaatttaaaattaatcttgcttcattgttacatgtaatatatttcagacattttcactggaagatttatgaacagaaatattggttgaaagttagagattttacaaaatgctgacaaaaatattttcctagcatcagtagatttctggcatatgtttctgctagctatatatttaggaaattcaaagcataaaactttggcaacatcttggctgttctagacacagtgtacttgtcaacccctctcaggtaccttttcttgggatgcttattagaagccaagtaaagtgcttaaggtttgttttcattaaattagctatttctgctcccctgttcaaagatgcattttgagtgtttatagatcactgccctttttgaaatcacctggtattatttttcttactggaaaagttagtattaaaatctacagaactacatatttgtgcctccttggtaaatacaacacatctaattaaatgtagacagatatttcaaacatcagctgaattcacttaagtttttccaaaacctcagttaaactgtgaagctattggaatttttttttcctggaatttttcccctttgattcacagtggtcccatttatatctgcttctagcttagtgctatgtgtgagatatgtgtgtgtttggtgtttttgtttttttgtttttttttttttaaggtttgcaaattaaaaagggccagaaaaatttggcaccaggcaaacgaataaagataggattgggaaagaagttgctaagtgtgcttagttttaataagtaattccttctcttttttcagagaaggccttacagaaaattgttgtgcttagaattgctggatgcatttttaccctccacacaaacctaaaaattttgtgacccctttcacttacctgaaaagtagagaaatggattcagtataaggataaggagggaaggtggaccagaatgaaaactgtaaatatttttttaacctaatatcacttaaatcgaggcagaaagatatagacattcaatgaattatattcaatgcatttaaaataccactgtaattgacagagtaaaagtatagatacaaaaccttgtgtaagaggctgacttttccaaataaacattttttaagaaaacatttcttctcccaaatgtctattttcttgaggaaaatattgctgtgtcttcattttcattaccaggtttcattttgggccttgctaaattgattgaattaaatcctccagcttttgaaccttgaaaaaaaaaaaaaaaaaaaaaaaaaaaaaaaaaaaagaaaaaaaaaaaaaaaaag

SEQ ID NO: 2040 - protein, 500 aa, Homo sapien
MPPAVGGPVGYTPPDGGWGWAVVIGAFISIGFSYAFPKSITVFFKEIEGIFHATTSEVSWISSIMLAVMYGGGPISSILVNKYGSRIVMIVGGCLSGCGLIAASFCNTVQQLYVCIGVIGGLGLAFNLNPALTMIGKYFYKRRPLANGLAMAGSPVFLCTLAPLNQVFFGIFGWRGSFLILGGLLLNCCVAGALMRPIGPKPTKAGKDKSKASLEKAGKSGVKKDLHDANTDLIGRHPKQEKRSVFQTINQFLDLTLFTHRGFLLYLSGNVIMFFGLFAPLVFLSSYGKSQHYSSEKSAFLLSILAFVDMVARPSMGLVANTKPIRPRIQYFFAASVVANGVCHMLAPLSTTYVGFCVYAGFFGFAFGWLSSVLFETLMDLVGPQRFSSAVGLVTIVECCPVLLGPPLLGRLNDMYGDYKYTYWACGVVLIISGIYLFIGMGINYRLLAKEQKANEQKKESKEEETSIDVAGKPNEVTKAAESPDQKDTEGGPKEEESPV

SEQ ID NO: 2041 - DNA, 2681 bp, Homo sapien
ggcacgaggaggaagagccgcgggcccggcggctgaggccaccccggcggcggctggagagcgaggaggagcgggtggccccgcgctgcgcccgccctcgcctcacctggcgcaggtggacacctgcgcaggtgtgtgccctccggcccctgaagcatggccagcagcggcatggctgacagcgccaaccacctgcccttctttttcggcaacatcacccgggaggaggcagaagattacctggtccaggggggcatgagtgatgggctttatttgctgcgccagagccgcaactacctgggtggcttcgccctgtccgtggcccacgggaggaaggcacaccactacaccatcgagcgggagctgaatggcacctacgccatcgccggtggcaggacccatgccagccccgccgacctctgccactaccactcccaggagtctgatggcctggtctgcctcctcaagaagcccttcaaccggccccaaggggtgcagcccaagactgggccctttgaggatttgaaggaaaacctcatcagggaatatgtgaagcagacatggaacctgcagggtcaggctctggagcaggccatcatcagtcagaagcctcagctggagaagctgatcgctaccacagcccatgaaaaaatgccttggttccatggaaaaatctctcgggaagaatctgagcaaattgtcctgataggatcaaagacaaatggaaagttcctgatccgagccagagacaacaacggctcctacgccctgtgcctgctgcacgaagggaaggtgctgcactatcgcatcgacaaagacaagacagggaagctctccatccccgagggaaagaagttcgacacgctctggcagctagtcgagcattattcttataaagcagatggtttgttaagagttcttactgtcccatgtcaaaaaatcggcacacagggaaatgttaattttggaggccgtccacaacttccaggttcccatcctgcgacttggtcagcgggtggaataatctcaagaatcaaatcatactccttcccaaagcctggccacagaaagtcctcccctgcccaagggaaccggcaagagagtactgtgtcattcaatccgtatgagccagaacttgcaccctgggctgcagacaaaggcccccagagagaagccctacccatggacacagaggtgtacgagagcccctacgcggaccctgaggagatcaggcccaaggaggtttacctggaccgaaagctgctgacgctggaagacaaagaactgggctctggtaattttggaactgtgaaaaagggctactaccaaatgaaaaaagttgtgaaaaccgtggctgtgaaaatactgaaaaacgaggccaatgaccccgctcttaaagatgagttattagcagaagcaaatgtcatgcagcagctggacaacccgtacatcgtgcgcatgatcgggatatgcgaggccgagtcctggatgctagttatggagatggcagaacttggtcccctcaataagtatttgcagcagaacagacatgtcaaggataagaacatcatagaactggttcatcaggtttccatgggcatgaagtacttggaggagagcaattttgtgcacagagatctggctgcaagaaatgtgttgctagttacccaacattatgccaagatcagtgatttcggactctccaaagcactgcgtgctgatgaaaactactacaaggcccagacccatggaaagtggcctgtcaagtggtacgctccggaatgcatcaactactacaagttctccagcaaaagcgatgtctggagctttggagtgttgatgtgggaagcattctcctatgggcagaagccatatcgagggatgaaaggaagtgaagtcaccgctatgttagagaaaggagagcggatggggtgccctgcagggtgtccaagagagatgtacgatctcatgaatctgtgctggacatacgatgtggaaaacaggcccggattcgcagcagtggaactgcggctgcgcaattactactatgacgtggtgaactaaccgctcccgcacctgtcggtggctgcctttgatcacaggagcaatcacaggaaaatgtatccagaggaattgattgtcagccacctccctctgccagtcgggagagccaggcttggatggaacatgcccacaacttgtcacccaaagcctgtcccaggactcaccctccacaaagcaaaggcagtcccgggagaaaagacggatggcaggatccaaggggctagctggatttgtttgttttcttgtctgtgtgattttcatacaggttatttttacgatctgtttccaaatccctttcatgtctttccacttctctgggtcccggggtgcatttgttactcatcgggcccagggacattgcagagtggcctagagcactctcaccccaagcggccttttccaaatgcccaaggatgccttagcatgtgactcctgaagggaaggcaaaggcagaggaatttggctgcttctacggccatgagactgatccctggccactgaaaagctttcctgacaataaaaatgttttgaggctttaaaaagaaaatcaagtttgaccagtgcagtttctaagcatgtagccagttaaggaaagaaagaaaaaaaaaaaaaaaaaa

SEQ ID NO: 2042 - protein, 635 aa, Homo sapien
MASSGMADSANHLPFFFGNITREEAEDYLVQGGMSDGLYLLRQSRNYLGGFALSVAHGRKAHHYTIERELNGTYAIAGGRTHASPADLCHYHSQESDGLVCLLKKPFNRPQGVQPKTGPFEDLKENLIREYVKQTWNLQGQALEQAIISQKPQLEKLIATTAHEKMPWFHGKISREESEQIVLIGSKTNGKFLIRARDNNGSYALCLLHEGKVLHYRIDKDKTGKLSIPEGKKFDTLWQLVEHYSYKADGLLRVLTVPCQKIGTQGNVNFGGRPQLPGSHPATWSAGGIISRIKSYSFPKPGHRKSSPAQGNRQESTVSFNPYEPELAPWAADKGPQREALPMDTEVYESPYADPEEIRPKEVYLDRKLLTLEDKELGSGNFGTVKKGYYQMKKVVKTVAVKILKNEANDPALKDELLAEANVMQQLDNPYIVRMIGICEAESWMLVMEMAELGPLNKYLQQNRHVKDKNIIELVHQVSMGMKYLEESNFVHRDLAARNVLLVTQHYAKISDFGLSKALRADENYYKAQTHGKWPVKWYAPECINYYKFSSKSDVWSFGVLMWEAFSYGQKPYRGMKGSEVTAMLEKGERMGCPAGCPREMYDLMNLCWTYDVENRPGFAAVELRLRNYYYDVVN

SEQ ID NO: 2043 - DNA, 3734 bp, Homo sapien
caaatgcgaacttaggctgttacacaactgctggggtctgttctcgccgcccgcccggcagtcaggcagcgtcgccgccgtggtagcagcctcagccgtttctggagtctcgggcccacagtcaccgccgcttacctgcgcctcctcgagcctccggagtccccgtccgcccgcacaggccggttcgccgtctgcgtctcccccacgccgcctcgcctgccgccgcgctcgtccctccgggccgacatgagtggggaccacctccacaacgattcccagatcgaagcggatttccgattgaatgattctcataaacacaaagataaacacaaagatcgagaacaccggcacaaagaacacaagaaggagaaggaccgggaaaagtccaagcatagcaacagtgaacataaagattctgaaaagaaacacaaagagaaggagaagaccaaacacaaagatggaagctcagaaaagcataaagacaaacataaagacagagacaaggaaaaacgaaaagaggaaaaggttcgagcctctggggatgcaaaaataaagaaggagaaggaaaatggcttctctagtccaccacaaattaaagatgaacctgaagatgatggctattttgttcctcctaaagaggatataaagccattaaagagacctcgagatgaggatgatgctgattataaacctaagaaaattaaaacagaagataccaagaaggagaagaaaagaaaactagaagaagaagaggatggtaaattgaaaaaacccaagaataaagataaagataaaaaagttcctgagccagataacaagaaaaagaagccgaagaaagaagaggaacagaagtggaaatggtgggaagaagagcgctatcctgaaggcatcaagtggaaattcctagaacataaaggtccagtatttgccccaccatatgagcctcttccagagaatgtcaagttttattatgatggtaaagtcatgaagctgagccccaaagcagaggaagtagctacgttctttgcaaaaatgctcgaccatgaatatactaccaaggaaatatttaggaaaaatttctttaaagactggagaaaggaaatgactaatgaagagaagaatattatcaccaacctaagcaaatgtgattttacccagatgagccagtatttcaaagcccagacggaagctcggaaacagatgagcaaggaagagaaactgaaaatcaaagaggagaatgaaaaattactgaaagaatatggattctgtattatggataaccacaaagagaggattgctaacttcaagatagagcctcctggacttttccgtggccgcggcaaccaccccaagatgggcatgctgaagagacgaatcatgcccgaggatataatcatcaactgtagcaaagatgccaaggttccttctcctcctccaggacataagtggaaagaagtccggcatgataacaaggttacttggctggtttcctggacagagaacatccaaggttccattaaatacatcatgcttaaccctagttcacgaatcaagggtgagaaggactggcagaaatacgagactgctcggcggctgaaaaaatgtgtggacaagatccggaaccagtatcgagaagactggaagtccaaagagatgaaagtccggcagagagctgtagccctgtacttcatcgacaagcttgctctgagagcaggcaatgaaaaggaggaaggagaaacagcggacactgtgggctgctgctcacttcgtgtggagcacatcaatctacacccagagttggatggtcaggaatatgtggtagagtttgacttcctcgggaaggactccatcagatactataacaaggtccctgttgagaaacgagtttttaagaacctacaactatttatggagaacaagcagcccgaggatgatctttttgatagactcaatactggtattctgaataagcatcttcaggatctcatggagggcttgacagccaaggtattccgtacatacaatgcctccatcacgctacagcagcagctaaaagaactgacagccccggatgagaacatcccagcgaagatcctttcttataaccgtgccaatcgagctgttgcaattctttgtaaccatcagagggcaccaccaaaaacttttgagaagtctatgatgaacttgcaaactaagattgatgccaagaaggaacagctagcagatgcccggagagacctgaaaagtgctaaggctgatgccaaggtcatgaaggatgcaaagacgaagaaggtagtagagtcaaagaagaaggctgttcagagactggaggaacagttgatgaagctggaagttcaagccacagaccgagaggaaaataaacagattgccctgggaacctccaaactcaattatctggaccctaggatcacagtggcttggtgcaagaagtggggtgtcccaattgagaagatttacaacaaaacccagcgggagaagtttgcctgggccattgacatggctgatgaagactatgagttttagccagtctcaagaggcagagttctgtgaagaggaacagtgtggtttgggaaagatggataaactgagcctcacttgccctcgtgcctgggggagagaggcagcaagtcttaacaaaccaacatctttgcgaaaagataaacctggagatattataagggagagctgagccagttgtcctatggacaacttatttaaaaatatttcagatatcaaaattctagctgtatgatttgttttgaattttgtttttattttcaagagggcaagtggatgggaatttgtcagcgttctaccaggcaaattcactgtttcactgaaatgtttggattctcttagctactgtatgcaaagtccgattatattggtgcgtttttacagttagggttttgcaataacttctatattttaatagaaataaattcctaaactcccttccctctctcccatttcaggaatttaaaattaagtagaacaaaaaacccagcgcacctgttagagtcgtcactctctattgtcatggggatcaattttcattaaacttgaagcagtcgtggctttggcagtgttttggttcagacacctgttcacagaaaaagcatgatgggaaaatatttcctgacttgagtgttcctttttaaatgtgaatttttatttctttttaattattttaaaatatttaaacctttttcttgatcttaaagatcgtgtagattggggttggggagggatgaagggcgagtgaatctaaggataatgaaataatcagtgactgaaaccattttcccatcatcctttgttctgagcattcgctgtaccctttaagatatccatctttttctttttaaccctaatctttcacttgaaagattttattgtataaaaagtttcacaggtcaataaacttagaggaaaatgagtatttggtccaaaaaaaggaaaaataatcaagattttagggcttttattttttcttttgtaattgtgtaaaaaatggaaaaaaacataaaaagcagaattttaatgtgaagacattttttgctataatcattagttttagaggcattgttagtttagtgtgtgtgcagagtccatttcccacatctttcctcaagtatcttctatttttatcatgaattcccttttaatcaactgtaggttatttaaaataaattcctacaacttaatggaaa

SEQ ID NO: 2044 - protein, 765 aa, Homo sapien
MSGDHLHNDSQIEADFRLNDSHKHKDKHKDREHRHKEHKKEKDREKSKHSNSEHKDSEKKHKEKEKTKHKDGSSEKHKDKHKDRDKEKRKEEKVRASGDAKIKKEKENGFSSPPQIKDEPEDDGYFVPPKEDIKPLKRPRDEDDADYKPKKIKTEDTKKEKKRKLEEEEDGKLKKPKNKDKDKKVPEPDNKKKKPKKEEEQKWKWWEEERYPEGIKWKFLEHKGPVFAPPYEPLPENVKFYYDGKVMKLSPKAEEVATFFAKMLDHEYTTKEIFRKNFFKDWRKEMTNEEKNIITNLSKCDFTQMSQYFKAQTEARKQMSKEEKLKIKEENEKLLKEYGFCIMDNHKERIANFKIEPPGLFRGRGNHPKMGMLKRRIMPEDIIINCSKDAKVPSPPPGHKWKEVRHDNKVTWLVSWTENIQGSIKYIMLNPSSRIKGEKDWQKYETARRLKKCVDKIRNQYREDWKSKEMKVRQRAVALYFIDKLALRAGNEKEEGETADTVGCCSLRVEHINLHPELDGQEYVVEFDFLGKDSIRYYNKVPVEKRVFKNLQLFMENKQPEDDLFDRLNTGILNKHLQDLMEGLTAKVFRTYNASITLQQQLKELTAPDENIPAKILSYNRANRAVAILCNHQRAPPKTFEKSMMNLQTKIDAKKEQLADARRDLKSAKADAKVMKDAKTKKVVESKKKAVQRLEEQLMKLEVQATDREENKQIALGTSKLNYLDPRITVAWCKKWGVPIEKIYNKTQREKFAWAIDMADEDYEF

SEQ ID NO: 2045 - DNA, 1158 bp, Homo sapien
ggaattccgtggccaggatgctgagcctgctgctgctggcgctgcccgtcctggcgagccgcgcctacgcggcccctgccccagtccaggccctgcagcaagcgggtatcgtcgggggtcaggaggcccccaggagcaagtggccctggcaggtgagcctgagagtccgcgaccgatactggatgcacttctgcgggggctccctcatccacccccagtgggtgctgaccgcggcgcactgcctgggaccggacgtcaaggatctggccaccctcagggtgcaactgcgggagcagcacctctactaccaggaccagctgctgccagtcagcaggatcatcgtgcacccacagttctacatcatccagactggagcggatatcgccctgctggagctggaggagcccgtgaacatctccagccgcgtccacacggtcatgctgccccctgcctcggagaccttccccccggggatgccgtgctgggtcactggctggggcgatgtggacaatgatgagcccctcccaccgccatttcccctgaagcaggtgaaggtccccataatggaaaaccacatttgtgacgcaaaataccaccttggcgcctacacgggagacgacgtccgcatcatccgtgacgacatgctgtgtgccgggaacagccagagggactcctgcaagggcgactctggagggcccctggtgtgcaaggtgaatggcacctggctacaggcgggcgtggtcagctgggacgagggctgtgcccagcccaaccggcctggcatctacacccgtgtcacctactacttggactggatccaccactatgtccccaaaaagccgtgagtcaggcctgggtgtgccacctgggtcactggaggaccaacccctgctgtccaaaacaccactgcttcctacccaggtggcgactgccccccacaccttccctgccccgtcctgagtgccccttcctgtcctaagccccctgctctcttctgagccccttcccctgtcctgaggacccttccccatcctgagcccccttccctgtcctaagcctgacgcctgcactgggccctccggccctcccctgcccaggcagctggtggtgggcgctaatcctcctgagtgctggacctcattaaagtgcatggaaatc

SEQ ID NO: 2046 - protein, 275 aa, Homo sapien [sequence omitted]

SEQ ID NO: 2047 - DNA, 3448 bp, Homo sapien
attaaccttctcttagtcttcaacctaagtacttgaatgtcaagtaccctccaaccctcaatgtcccaagacttttaagagcggaaggtaccgatgagttccatcctttactagggtcaccaaggaaggcatgggtatatggaaatttttattattattccatctgaatatcattttctagagaataggagcttttgttctgaagggctgccggcttccttctgggatctagcagccagggttagatcacaggtgtcactttcaggcgagtagttagcaacggtatcgctagcaactgagccgacccctgcagccagaggtttgcagtgggtagtgtgtattccagaaagggccctgacatgtgaaaggaaggaatgtgccctaatattctacagttgttttatcgttgctactgattaggtccatggagggaagcccatccctgagacgcatgacagtgatgcgggagaagggccggcgccaggctgtcaggggcccggccttcatgttcaatgaccgcggcaccagcctcaccgccgaggaggagcgcttcctcgacgccgccgagtacggcaacatcccagtggtgcgcaagatgctggaggagtccaagacgctgaacgtcaactgcgtggactacatgggccagaacgcgctgcagctggctgtgggcaacgagcacctggaggtgaccgagctgctgctcaagaaggagaacctggcgcgcattggcgacgccctgctgctcgccatcagcaagggctacgtgcgcatcgtagaggccatcctcaaccaccctggcttcgcggccagcaagcgtctcactctgagcccctgtgagcaggagctgcaggacgacgacttctacgcttacgacgaggacggcacgcgcttctcgccggacatcacccccatcatcctggcggcgcactgccagaaatacgaagtggtgcacatgctgctgatgaagggtgccaggatcgagcggccgcacgactatttctgcaagtgcggggactgcatggagaagcagaggcacgactccttcagccactcacgctcgaggatcaatgcctacaaggggctggccagcccggcttacctctcattgtccagcgaggacccggtgcttacggccctagagctcagcaacgagctggccaagctggccaacatagagaaggagttcaagaatgactatcggaagctctccatgcaatgcaaagactttgtagtgggtgtgctggatctctgccgagactcagaagaggtagaagccattctgaatggagatctggaatcagcagagcctctggaggtacacaggcacaaagcttcattaagtcgtgtcaaacttgccattaagtatgaagtcaaaaagtttgtggctcatcccaactgccagcagcagctcttgacgatctggtatgagaacctctcaggcctaagggagcagaccatagctatcaagtgtctcgttgtgctggtcgtggccctgggccttccattcctggccattggctactggatcgcaccttgcagcaggctggggaaaattctgcgaagcccttttatgaagtttgtagcacatgcagcttctttcatcatcttcctgggtctgcttgtgttcaatgcctcagacaggttcgaaggcatcaccacgctgcccaatatcacagttactgactatcccaaacagatcttcagggtgaaaaccacccagtttacatggactgaaatgctaattatggtctgggttcttggaatgatgtggtctgaatgtaaagagctctggctggaaggacctagggaatacattttgcagttgtggaatgtgcttgactttgggatgctgtccatcttcattgctgctttcacagccagattcctagctttccttcaggcaacgaaggcacaacagtatgtggacagttacgtccaagagagtgacctcagtgaagtgacactcccaccagagatacagtatttcacttatgctagagataaatggctcccttctgaccctcagattatatctgaaggcctttatgccatagctgttgtgctcagcttctctcggattgcgtacatcctccctgcaaatgagagctttggccccctgcagatctctcttggaaggactgtaaaggacatattcaagttcatggtcctctttattatggtgttttttgcctttatgattggcatgttcatactttattcttactaccttggggctaaagttaatgctgcttttaccactgtagaagaaagtttcaagactttattttggtcaatatttgggttgtctgaagtgacttccgttgtgctcaaatatgatcacaaattcatagaaaatattggatacgttctttatggaatatacaatgtaactatggtggtcgttttactcaacatgctaattgctatgattaatagctcatatcaagaaattgaggatgacagtgatgtagaatggaagtttgctcgttcaaaactttggttatcctattttgatgatggaaaaacattacctccacctttcagtctagttcctagtccaaaatcatttgtttatttcatcatgcgaattgttaactttcccaaatgcagaaggagaaggcttcagaaggatatagaaatgggaatgggtaactcaaagtccaggttaaacctcttcactcagtctaactcaagagtttttgaatcacacagttttaacagcattctcaatcagccaacacgttatcagcagataatgaaaagacttataaagcggtatgttttgaaagcacaagtagacaaagaaaatgatgaagttaatgaaggtgaattaaaagaaatcaagcaagatatctccagccttcgttatgaacttttggaagacaagagccaagcaactgaggaattagccattctaattcataaacttagtgagaaactgaatcccagcatgctgagatgtgaatgatgcagcaacctggatttggctttgactatagcacaaatgtgggcaataatatttctaagtatgaaatacttgaaaaactatgatgtaaatttttagtattaactacctttatcatgtgaacctttaaaagttagctcttaatggttttattgttttatcacatgaaaatgcattttatttgtctgctttgacattacagtggcataccattgtgttgaaaagcccaatattactatattattgaaacttttattcattttagagtaaactccacatctttgcactacctgtttgcctccaagagactatcagttccttggggacagggaccatgtcttattcatctttgtgtctccagcatctagtacagtgcctggtatatagtaggtgctcaataaatgttgaaaccaactgaactgccaacaaaataaaaataaaaagtcttcactatgtagcataaaaaaaaaaaaaaaaaaa

SEQ ID NO: 2048 - protein, 848 aa, Homo sapien
MEGSPSLRRMTVMREKGRRQAVRGPAFMFNDRGTSLTAEEERFLDAAEYGNIPVVRKMLEESKTLNVNCVDYMGQNALQLAVGNEHLEVTELLLKKENLARIGDALLLAISKGYVRIVEAILNHPGFAASKRLTLSPCEQELQDDDFYAYDEDGTRFSPDITPIILAAHCQKYEVVHMLLMKGARIERPHDYFCKCGDCMEKQRHDSFSHSRSRINAYKGLASPAYLSLSSEDPVLTALELSNELAKLANIEKEFKNDYRKLSMQCKDFVVGVLDLCRDSEEVEAILNGDLESAEPLEVHRHKASLSRVKLAIKYEVKKFVAHPNCQQQLLTIWYENLSGLREQTIAIKCLVVLVVALGLPFLAIGYWIAPCSRLGKILRSPFMKFVAHAASFIIFLGLLVFNASDRFEGITTLPNITVTDYPKQIFRVKTTQFTWTEMLIMVWVLGMMWSECKELWLEGPREYILQLWNVLDFGMLSIFIAAFTARFLAFLQATKAQQYVDSYVQESDLSEVTLPPEIQYFTYARDKWLPSDPQIISEGLYAIAVVLSFSRIAYILPANESFGPLQISLGRTVKDIFKFMVLFIMVFFAFMIGMFILYSYYLGAKVNAAFTTVEESFKTLFWSIFGLSEVTSVVLKYDHKFIENIGYVLYGIYNVTMVVVLLNMLIAMINSSYQEIEDDSDVEWKFARSKLWLSYFDDGKTLPPPFSLVPSPKSFVYFIMRIVNFPKCRRRRLQKDIEMGMGNSKSRLNLFTQSNSRVFESHSFNSILNQPTRYQQIMKRLIKRYVLKAQVDKENDEVNEGELKEIKQDISSLRYELLEDKSQATEELAILIHKLSEKLNPSMLRCE

SEQ ID NO: 2049 - DNA, 5000 bp, Homo sapien
ggcacgagcagaagcaacaataattgtgaaaaatacttcagcagttatggactcatctgtcattcaaaggaaaaaagtagctgtcattggtggtggcttggttggctcattacaagcatgctttcttgcaaagaggaatttccagattgatgtatatgaagctagggaagatactcgagtggctaccttcacacgtggaagaagcattaacttagccctttctcatagaggacgacaagccttgaaagctgttggcctggaagatcagattgtatcccaaggtattcccatgagagcaagaatgatccactctctttcaggaaaaaagtctgcaattccctatgggacaaagtctcagtatattctttctgtaagcagagaaaatctaaacaaggatctattgactgctgctgagaaataccccaatgtgaaaatgcactttaaccacaggctgttgaaatgtaatccagaggaaggaatgatcacagtgcttggatctgacaaagttcccaaagatgtcacttgtgacctcattgtaggatgtgatggagcctattcaactgtcagatctcacctgatgaagaaacctcgctttgattacagtcagcagtacattcctcatgggtacatggagttgactattccacctaagaacggagattatgccatggaacctaattatctgcatatttggcctagaaatacctttatgatgattgcacttcctaacatgaacaaatcattcacatgtactttgttcatgccctttgaagagtttgaaaaacttctaaccagtaatgatgtggtagatttcttccagaaatactttccggatgccatccctctaattggagagaaactcctagtgcaagatttcttcctgttgcctgcccagcccatgatatctgtaaagtgctcttcatttcactttaaatctcactgtgtactgctgggagatgcagctcatgctatagtgccgttttttgggcaaggaatgaatgcgggctttgaagactgcttggtatttgatgagttaatggataaattcagtaacgaccttagtttgtgtcttcctgtgttctcaagattgagaatcccagatgatcacgcgatttcagacctatccatgtacaattacatagagatgcgagcacatgtcaactcaagctggttcatttttcagaagaacatggagagatttcttcatgcgattatgccatcgacctttatccctctctatacaatggtcactttttccagaataagataccatgaggctgtgcagcgttggcattggcaaaaaaaggtgataaacaaaggactctttttcttgggatcactgatagccatcagcagtacctacctacttatacactacatgtcaccacgatctttcctctgcttgagaagaccatggaactggatagctcacttccggaatacaacatgtttccccgcaaaggccgtggactccctagaacaaatttccaatctcattagcaggtgatagaaaggttttgtggtagcaaatgcatgatttctctgtgaccaaaattaagcatgaaaaaaatgtttccattgccatatttgattcactagtggaagatagtgttctgcttataattaaactgaatgtagagtatctctgtatgttaattgcaattactggttggggggtgcattttaaaagatgaaacatgcagcttccctacattacacacactcaggttgagtcattctaactataaaagtgcaatgactaagatccttcacttctctgaaagtaaggccctagatgcctcagggaagacagtaatcatgccttttctttaaaagacacaataggactcgcaacagcattgactcaacacctaggactaaaaatcacaacttaactagcatgttaactgcacttttcattacgtgaatggaacttacctaaccacagggctcagacttactagataaaaccagaaatggaaataaggaattcaggggagttccagagacttacaaaatgaactcattttattttcccaccttcaaatataagtattatcatctatctgtttatcgtctatctatctatcatctatctatctatctatcatctatctatctatctatctatctatctatctatctatctatctatctatctctatttatttatgtatttagagatcaggtctcactctgttgaccaggctggagtgcagtggtgagatctgggttcactgcaacctctgcctcctgggctcaagcaatcctcccacttcagcctcccaaatagctggggctaccatggtatttttcagtagagaccgggtcttgccatgctgcccaggccagtctcaaactcctggcctcatgtgatctgcccacctcagcctcccaaagtacagggattagagttgtgagccaccgctgccagcccagagttaccctctaaagataagaaaaaggctattaatatcatactaagtgaaggacaggaaagggttttattcataaattaaatgtctacatgtgccagaatggaaaggaaacaaggggagacaacttttatagaaatacaaagccattactttattcaatttcagaccctcagaagcaatttactaatttattcttcgactacatactgcagcagaaccagcaatacacttgatttttaaaagcacatttagtgaaatgttttctttggttcatccttctttaacaggctgctgagtcactcagaaatccttcaaacatgattaattatgaagatgaaacactagagtcatataagaaataaaaattgggcaataaaataaaatgattcagtgtttcttttctatattgtcaatgaaaaccttgagttctaataatccatgttcagtttgtagggaaagaaaaaataatttttccttctacccactttaggttccttggctggggcccctataacaaaagacagattgacaagagaaaaacaaacataaatttattagcgggtatatgtaatatatatgtgggaaatacaggggaatgagcaaatctcaaagagctggcgtcttagaactccctggcttatatagcatcgacaaagaacagtaaatttttagagaaacaacaaaacaaagaaaaagagctttgagtctgtaggggcagcaatttgggggaagcaaatatatgggagtttgccttgtagattcctctggtggtggtctccaggctgacaaggattcaaagttgtctctgaaactcctctttgtcatactgcacatataaaacgtcttttgtttccaacaagaggatttctttttcattctagaattatctccttgataacttgatcagatataggacatgacactgaatagagtccaacagtacaaaaaaaattcagtatgttctagctacttcacacatgtgtacgcgacagttatttttacagtaaggtattttcgagaaaaatgcattacgtgttttggaaaatagagtaatttaaaaaatatatttgaaatgaaaatctccaacacattagaagatgatgatgttagatgcccatcgtgtgccacaagtggttttttcattatgtaaagcacccgttgaattaaaagaatttgtttttgttcaacctcttcctgaggcccaagagcatatgggcaattcggatttcctgctggaccacaaggttctgttgatattacatagaaacgggtattccagacacttcttatgatgaaagtccaaaagtggcatccaatttaaggccccatctttcgttgccattcttcattcctacaaaggacgaacttggattacatcaactttggacccattggttttgtcgctgtcgtcaactgacagtgattcaccactggtgatgataaaaatgatggaagaagagttgaaagtcacttttttctttggcctgtccccatctttctgtgacatcacaatgggtctgatctgcatttcacttccagctgctggtaggtctttagcaggcctctggcacctcagcagtcggaggcacagaagctgcaaaagggatcttcgaaactgggcagagaaaaaataaagtggaatattaagtaaaagttgggcactaatctggattaacattcgaggaaatcagttgagctgatttaagttgttttttgtttgttagcaggtgtggatgtggggttatgtggtcatgctcagatctacctaaatcaccccagagctttatgtcttttattcattctaaatcttattaaccggaatatgtaggaccatttcaataccttgtaatcctccaagcttcaatctgcacacactttctatgagggcaggtacaactattaagagattttgaacattaagttagtccacaaatattcagtgggcatctactaggtgacagccactgtgctataattagagactttttactataagcatcaaaaacagataaggctcttcctggcagagtttacagcctggtgtacttgctaatgtctctttaattaggtgaagaattttttttttctatcgaaattactaatcagttggggaaaaaaatactatagcagacagcactaatgtcatcaacaaacattgttcttctccgtgtcctgggtacaacatcgaataatatttcttggcctcctttccgcttctcctctctgctgttcctctctacaagaacctgggaggccaacgcctaaagatcataatatcacaatggaaggaacctagattcctaaatgactgcataggacagatcccatctcctccacccaatacattattagactgaactgtgacctgaaatgagcaataaactctgtattaattcactgaaatgttggggttgcttgttatagtagtcggtccatcatgaccagtaaaacataaatcaaaagttaatgtaattgttatcccattatttagagcgaaataaatgttgaatatatggactttctcagattaggaaataccaattaaaaatataataaatagct

SEQ ID NO: 2050 - protein, 486 aa, Homo sapien
MDSSVIQRKKVAVIGGGLVGSLQACFLAKRNFQIDVYEAREDTRVATFTRGRSINLALSHRGRQALKAVGLEDQIVSQGIPMRARMIHSLSGKKSAIPYGTKSQYILSVSRENLNKDLLTAAEKYPNVKMHFNHRLLKCNPEEGMITVLGSDKVPKDVTCDLIVGCDGAYSTVRSHLMKKPRFDYSQQYIPHGYMELTIPPKNGDYAMEPNYLHIWPRNTFMMIALPNMNKSFTCTLFMPFEEFEKLLTSNDVVDFFQKYFPDAIPLIGEKLLVQDFFLLPAQPMISVKCSSFHFKSHCVLLGDAAHAIVPFFGQGMNAGFEDCLVFDELMDKFSNDLSLCLPVFSRLRIPDDHAISDLSMYNYIEMRAHVNSSWFIFQKNMERFLHAIMPSTFIPLYTMVTFSRIRYHEAVQRWHWQKKVINKGLFFLGSLIAISSTYLLIHYMSPRSFLCLRRPWNWIAHFRNTTCFPAKAVDSLEQISNLISR

SEQ ID NO: 2051 - DNA, 1007 bp, Homo sapien
gacgctgcggggcgggcggacagactgcgggacggacggtggacgctgggacgcgtttgtagctccggccccgccgttccgacccccgccgccgtcgccgccatgacggggctagcactgctctactccggggtcttcgtggccttctgggcctgcgcgctggccgtgggagtctgctacaccatttttgatttgggcttccgctttgatgtggcatggttcctgacggagacttcgcccttcatgtggtccaacctgggcattggcctagctatctccctgtctgtggttggggcagcctggggcatctatattaccggctcctccatcattggtggaggagtgaaggcccccaggatcaagaccaagaacctggtcagcatcatcttctgtgaggctgtggccatctacggcatcatcatggcaattgtcattagcaacatggctgagcctttcagtgccacagaccccaaggccatcggccatcggaactaccatgcaggctactccatgtttggggctggcctcaccgtaggcctgtctaacctcttctgtggagtctgcgtgggcatcgtgggcagtggggctgccctggccgatgctcagaaccccagcctctttgtaaagattctcatcgtggagatctttggcagcgccattggcctctttggggtcatcgtcgcaattcttcagacctccagagtgaagatgggtgactagatgatatgtgtgggtggggccgtgcctcacttttatttattgctggttttcctgggacagctggagctgtgtcccttagcctttcagaggcttggtgttcagggccctccctgcactcccctcttgctgcgtgttgatttggaggcactgcagtccaggccgagtcctcagtgcggggagcaggctgctgctgctgactctgtgcagctgcgcacctgtgtcccccacctccaccctcaacccatcttcctagtgtttgtgaaataaacttggtatttgtctgggtc

SEQ ID NO: 2052 - protein, 205 aa, Homo sapien
MTGLALLYSGVFVAFWACALAVGVCYTIFDLGFRFDVAWFLTETSPFMWSNLGIGLAISLSVVGAAWGIYITGSSIIGGGVKAPRIKTKNLVSIIFCEAVAIYGIIMAIVISNMAEPFSATDPKAIGHRNYHAGYSMFGAGLTVGLSNLFCGVCVGIVGSGAALADAQNPSLFVKILIVEIFGSAIGLFGVIVAILQTSRVKMGD

SEQ ID NO: 2053 - DNA, 827 bp, Homo sapien
gactgtctcagtggagctgggtcatctcaggccttggctccttgaacttttggccgccatgtgcttcccgaaggtcctctctgatgacatgaagaagctgaaggcccgaatgcaccaggccatagaaagattttatgataaaatgcaaaatgcagaatcaggacgtggacaggtgatgtcgagcctggcagagctggaggacgacttcaaagagggctacctggagacagtggcggcttattatgaggagcagcacccagagctcactcctctacttgaaaaagaaagagatggattacggtgccgaggcaacagatcccctgtcccggatgttgaggatcccgcaaccgaggagcctggggagagcttttgtgacaaggtcatgagatggttccaggccatgctgcagcggctgcagacctggtggcacggggttctggcctgggtgaaggagaaggtggtggccctggtccatgcagtgcaggccctctggaaacagttccagagtttctgctgctctctgtcagagctcttcatgtcctctttccagtcctacggagccccacggggggacaaggaggagctgacaccccagaagtgctctgaaccccaatcctcaaaatgaagatactgacaccacctttgccctccccgtcaccgcgcacccaccctgacccctccctcagctgtcctgtgccccgccctctcccgcacactcagtccccctgcctggcgttcctgccgcagctctgacctggtgctgtcgccctggcatcttaataaaacctgcttatacttccctggaaaaaaaaaaaaaaaaaaaaaaa

SEQ ID NO: 2054 - protein, 188 aa, Homo sapien
MCFPKVLSDDMKKLKARMHQAIERFYDKMQNAESGRGQVMSSLAELEDDFKEGYLETVAAYYEEQHPELTPLLEKERDGLRCRGNRSPVPDVEDPATEEPGESFCDKVMRWFQAMLQRLQTWWHGVLAWVKEKVVALVHAVQALWKQFQSFCCSLSELFMSSFQSYGAPRGDKEELTPQKCSEPQSSK

SEQ ID NO: 2055 - DNA, 5207 bp, Homo sapien
agagttatattgtgccatttatggaaaaactctccccactgctcttggctttgacagtaggaatcaggttatatatggtctctcggtttgaagatatttgtcattaaaaaccagaacaagggctctgagatagggtcctttcctgacctactctggtaaagtctttatcctcaggatgcaaggataccaccctcttcctgtggaaagtgtcgaatcacatgcagagctctaagtctttcagttactttggagtgcagaaccatttcagacatgctgagggggactctactgtgcgcggtgctcgggcttctgcgcgcccagcccttcccctgtccgccagcttgcaagtgtgtcttccgggacgccgcgcagtgctcggggggcgacgtggcgcgcatctccgcgctgggcctgcccaccaacctcacgcacatcctgctcttcggaatgggccgcggcgtcctgcagagccagagcttcagcggcatgaccgtcctgcagcgcctcatgatctccgacagccacatttccgccgttgcccccggcaccttcagtgacctgataaaactgaaaaccctgaggctgtcgcgcaacaaaatcacgcatcttccaggtgcgctgctggataagatggtgctcctggagcagttgtttttggaccacaatgcgctaaggggcattgaccaaaacatgtttcagaaactggttaacctgcaggagctcgctctgaaccagaatcagctcgatttccttcctgccagtctcttcacgaatctggagaacctgaagttgttggatttatcgggaaacaacctgacccacctgcccaaggggttgcttggagcacaggctaagctcgagagacttctgctccactcgaaccgccttgtgtctctggattcggggctgttgaacagcctgggcgccctgacggagctgcagttccaccgaaatcacatccgttccatcgcacccggggccttcgaccggctcccaaacctcagttctttgacgctttcgagaaaccaccttgcgtttctcccctctgcgctctttcttcattcgcacaatctgactctgttgactctgttcgagaacccgctggcagagctcccgggggtgctcttcggggagatggggggcctgcaggagctgtggctgaaccgcacccagctgcgcaccctgcccgccgccgccttccgcaacctgagccgcctgcggtacttaggggtgactctgagcccgcggctgagcgcgcttccgcagggcgccttccagggccttggcgagctccaggtgctcgccctgcactccaacggcctgaccgccctccccgacggcttgctgcgcggcctcggcaagctgcgccaggtgtccctgcgccgcaacaggctgcgcgccctgccccgtgccctcttccgcaatctcagcagcctggagagcgtccagctcgaccacaaccagctggagaccctgcctggcgacgtgtttggggctctgccccggctgacggaggtcctgttggggcacaactcctggcgctgcgactgtggcctggggcccttcctggggtggctgcggcagcacctaggcctcgtgggcggggaagagcccccacggtgcgcaggccctggggcgcacgccggcctgccgctctgggccctgccggggggtgacgcggagtgcccgggcccccggggcccgcctccccgccccgctgcggacagctcctcggaagcccctgtccacccagccttggctcccaacagctcagaaccctgggtgtgggcccagccggtgaccacgggcaaaggtcaagatcatagtccgttctgggggttttattttctgcttttagctgttcaggccatgatcaccgtgatcatcgtgtttgctatgattaaaattggccaactctttcgaaaattaatcagagagagagcccttgggtaaaccaatgggaaaatcttctaattacttagaacctgaccagatgtggctcggaggggaatccagacccgctgctgtcttgctctccctcccctccccactcctcctctcttcttcctcttctctctcactgccacgccttcctttccctcctcctccccctctccgctctgtgctcttcattctcacgggcccgcaacccctcctctctctgtccccgcccgtctctggaaactgagcttgacgtttgtaaactgtggttgcctgccttcccagctccacgcggtgtgcgctgacactgccggggggctggactgtgttggacccatccttgccccgctgtgcctggcttggcctctggtggagagagggacctcttcagtgtctactgagtaaggggacagctccaggccggggctgtctcctgcacagagtaagccggtaaatgtttgtgaaatcaatgcgtggataaaggaacacatgccatccaagtgatgatggcttttcctggagggaaaggataggctgttgctctatctaattttttgtttttgtttttggacagtctagctctgtggcccaggctggcgtgcagtgggccgtctcagttcactgcagcctccgccctccaggttcaagtgattctcatgcctcagcgttctgagtagctgggattagaggcgtgtgccactacacccggctaatttttgtactttttaaagtagagacgggctttgccatattggcctggctgatctcaaactcctggtcttgaactcctggccacaagtgatctgcccgccttagcctcccaaagtgctgggattacaggcgcaagccactacacctgccctcttcatcgaattttatttgagaagtagagctcttgccattttttcccttgctccatttttctcactttatgtctctctgacctatgggctacttgggagagcactggactccattcatgcatgagcattttcaggataagcgacttctgtgaggctgagagaggaagaaaacacggagccttccctccaggtgcccagtgtaggtccagcgtgtttcctgagcctcctgtgagtttccacttgctttacatccatgcaacatgtcattttgaaactggattgatttgcatttcctggaactctgccacctcatttcacaagcatttatggagcagttaacatgtgactggtattcatgaatataatgataagcttgattctagttcagctgctgtcacagtctcatttgttcttccaactgaaagccgtaaaacctttgttgctttaattgaatgtctgtgcttatgagaggcagtggttaaaacattttctggcgagttgacaactgtgggttcaaatcccagctctaccacttactaactgcatgggactttgggtaagacacctgcttacattctctaagccttggtttcctgaaccttaaaacaggataacatagtacctgcttcatagagttttgtgagaattaaaggcaataaagcatataatgacttagcccagcggcctgcagacaatacatgttaatgaatgttagctattattactaaagatgagcaattattattggcatcatgatttctaaagaagagctttgagttggtatttttctctgtgtataagggtaagtccgaactttctcatactggaggttacattcacatcagtctgtcttcccctgcggatggcctcagccctgggtggccaggctctgtgctcacagtccagagcaatggatcctccaacaccaccaggtggatgtggagcaggagagctggatcgtggcatttgtttctgggttctgcagttgggagttggtttctgggttctccattggtctacttgtctagtcccataccagactcacggtctccattattggagctttaataatttttggtatagggtcatctctccaccttgtttttcttctattcttggttctttgcaattctatgaatatttcagggtcagcatgtcaactccattgaaaaaccctgctgggattttaatagaacttacagctcacgcctgtaatcccagcactttgggaggctgaggtgggtggatcacaggtcaggagtttgagaacagctggccaagatggtgaaaccccgtctctactaaaaatacaaaaattagctgggtgcggtggcaggtgcctgtagtcccagctacttgggacaccgaggcaggagaatcacttgaacccgggaggcggaggttgcagtgagccgagatcgtgccactgcactctagcctgggcgacagagcgagactccatctcaaaaaaaaagaaaaagaaaattgcagtaaatttaaaactaatttggggaagaatctgtatttttacaatacctagtgttcttgccagtaagcatggttcatcttcccatttatttacgtcattttaaatctttcagtgatgttttagaattttttttataaaaaccttcactataagaacagaaaaccaaacaccgcatgttctcactcataggtgggaattgaacaatgagaacacttggacacagggcggggaacgtcacacgcctggactgttgggggggtggctgggagagggatagtgttaggagaaatacctaatgtaaatgacgagttaatggtgcagccaaccaacctggcacatgtattcatatgtaacaaacctgcacgttgtgcacatgtaccctagaacttaaagtatattaaaaaaagaaaccttggcactgattttgttagatttattcctaggtatccttcctcttttttgatttgtcattgctattgtagatggcatctttttaaaaagttatattttctaaagcaaaaaataaaaaaagttgtatttctaatttttattaccaatatataagaatgtaatttatttttacataattatcttatgtctagtaataattctgataatttgcttcttcctattaaaaccttacacccattattgatttatttttctgttttaaaatatcttcctgcactggctaaaacctccactataatgttgagcagaacagtgaggcatccttagaactatcttggttgcaaagggtaggtctctaatgtttcatcaataaatgtgatgtttctagtctgagtttgctaagtatattttaaaataatcagtaaagttagattttatccatttttatcttaactattgagatgctcatatcatttttcttcttcaatgtgttaaaatggtga

SEQ ID NO: 2056 - protein, 560 aa, Homo sapien
MLRGTLLCAVLGLLRAQPFPCPPACKCVFRDAAQCSGGDVARISALGLPTNLTHILLFGMGRGVLQSQSFSGMTVLQRLMISDSHISAVAPGTFSDLIKLKTLRLSRNKITHLPGALLDKMVLLEQLFLDHNALRGIDQNMFQKLVNLQELALNQNQLDFLPASLFTNLENLKLLDLSGNNLTHLPKGLLGAQAKLERLLLHSNRLVSLDSGLLNSLGALTELQFHRNHIRSIAPGAFDRLPNLSSLTLSRNHLAFLPSALFLHSHNLTLLTLFENPLAELPGVLFGEMGGLQELWLNRTQLRTLPAAAFRNLSRLRYLGVTLSPRLSALPQGAFQGLGELQVLALHSNGLTALPDGLLRGLGKLRQVSLRRNRLRALPRALFRNLSSLESVQLDHNQLETLPGDVFGALPRLTEVLLGHNSWRCDCGLGPFLGWLRQHLGLVGGEEPPRCAGPGAHAGLPLWALPGGDAECPGPRGPPPRPAADSSSEAPVHPALAPNSSEPWVWAQPVTTGKGQDHSPFWGFYFLLLAVQAMITVIIVFAMIKIGQLFRKLIRERALG

SEQ ID NO: 2057 - DNA, 1061 bp, Homo sapien
agacaaaaagtaaccttcctgaagaggacatgtgattggaagttgtcaattgttgaagcattggtaactccagtctctaacgttttagaaaatcataacaagcggttctgtaccctgtaaagaacagaaacctggaaatctaaggctcaaagacatccaagtaattggtatctgggagatttgggattcaaacccagctctgcttgacttggtgaactactgagttcttcattatgtctgatggagattatgattacctcatcaagtttttagctttgggagactctggtgtagggaagaccagtgtactttaccaatatacagatggtaaatttaactccaaatttatcacaacagtgggcattgatttcaggccaaaaagagtggtgtacagagccagtgggccggatggaccagtaggtagaggccagagaatccacctgcagttatgggacacagcagggcaggagaggtttcgtagcttaacgacagcgttcttcagagatgctatgggttttcttctactttttgatctgacaaatgagcaaagtttcctcaatgtcagaaactggataagccagctacagatgcatgcatattgtgaaaacccagatatagtgctgtgtggaaacaagagtgatctggaggaccagagagtagtgaaagaggaggaagccatagcactcgcagagaaatatggaatcccctactttgaaactagtgctgccaatgggacaaacataagccaagcaattgagatgcttctggacctgataatgaagcgaatggaacggtgtgtggacaagtcctggattcctgaaggagtggtgcgatcaaatggtcatgcctctacggatcagttaagtgaagaaaaggagaaaggggcatgtggctgttgagaagtcaagtaacgacatagtagttcaggtggcccatgcctgggatcttctctatgattgatacatggcacagtgagagattaatgggcattgtgtacaaattgcttctcaccatccccattagacctacgaataaagcatccggttctaaaattaaaaaaa

SEQ ID NO: 2058 - protein, 221 aa, Homo sapien
MSDGDYDYLIKFLALGDSGVGKTSVLYQYTDGKFNSKFITTVGIDFRPKRVVYRASGPDGPVGRGQRIHLQLWDTAGQERFRSLTTAFFRDAMGFLLLFDLTNEQSFLNVRNWISQLQMHAYCENPDIVLCGNKSDLEDQRVVKEEEAIALAEKYGIPYFETSAANGTNISQAIEMLLDLIMKRMERCVDKSWIPEGVVRSNGHASTDQLSEEKEKGACGC

SEQ ID NO: 2059 - DNA, 2771 bp, Homo sapien
ggccacaggccagcgccactctgccaggctcccggccatcgcccgcctggtgcgccgcccgccagctctttgcccgcgcggggccgcccgccgcgggctcagggcagaccatgcgcccgccaagtccgctgcccgcccgctggctatgcgtgctggcaggcgccctcgcctgggcccttgggccggcgggcggccaggcggccaggctgcaggaggagtgtgactatgtgcagatgatcgaggtgcagcacaagcagtgcctggaggaggcccagctggagaatgagacaataggctgcagcaagatgtgggacaacctcacctgctggccagccacccctcggggccaggtagttgtcttggcctgtcccctcatcttcaagctcttctcctccattcaaggccgcaatgtaagccgcagctgcaccgacgaaggctggacgcacctggagcctggcccgtaccccattgcctgtggtttggatgacaaggcagcgagtttggatgagcagcagaccatgttctacggttctgtgaagaccggctacaccattggctacggcctgtccctcgccacccttctggtcgccacagctatcctgagcctgttcaggaagctccactgcacgcggaactacatccacatgcacctcttcatatccttcatcctgagggctgccgctgtcttcatcaaagacttggccctcttcgacagcggggagtcggaccagtgctccgagggctcggtgggctgtaaggcagccatggtctttttccaatattgtgtcatggctaacttcttctggctgctggtggagggcctctacctgtacaccctgcttgccgtctccttcttctctgagcggaagtacttctgggggtacatactcatcggctggggggtacccagcacattcaccatggtgtggaccatcgccaggatccattttgaggattatgggtgctgggacaccatcaactcctcactgtggtggatcataaagggccccatcctcacctccatcttggtaaacttcatcctgtttatttgcatcatccgaatcctgcttcagaaactgcggcccccagatatcaggaagagtgacagcagtccatactcaaggctagccaggtccacactcctgctgatccccctgtttggagtacactacatcatgttcgccttctttccggacaattttaagcctgaagtgaagatggtctttgagctcgtcgtggggtctttccagggttttgtggtggctatcctctactgcttcctcaatggtgaggtgcaggcggagctgaggcggaagtggcggcgctggcacctgcagggcgtcctgggctggaaccccaaataccggcacccgtcgggaggcagcaacggcgccacgtgcagcacgcaggtttccatgctgacccgcgtcagcccaggtgcccgccgctcctccagcttccaagccgaagtctccctggtctgaccaccaggatcccaggggcccaaggcggcccctcccgccccttcccactcaccccggcagacgccggggacagaggcctgcccgggcgcggccagccccggccctgggctcggaggctgcccccggccccctggtctctggtccggacactcctagagaacgcagccctagagcctgcctggagcgtttctagcaagtgagagagatgggagctcctctcctggaggattgcaggtggaactcagtcattagactcctcctccaaaggccccctacgccaatcaagggcaaaaagtctacatactttcatcctgactctgccccctgctggctcttctgcccaattggaggaaagcaaccggtggatcctcaaacaacactggtgtgacctgagggcagaaaggttctgcccggggaaggtcaccagcaccaacaccacggtagtgcctgaaatttcaccattgctgtcaagttcctttgggttaagcattaccactcaggcatttgactgaagatgcagctcactaccctattctctctttacgcttagttatcagctttttaaagtgggttattctggagtttttgtttggagagcacacctatcttagtggttccccaccgaagtggactggcccctgggtcagtctggtgggaggacggtgcaacccaaggactgagggactctgaagcctctgggaaatgagaaggcagccaccagcgaatgctaggtctcggactaagcctacctgctctccaagtctcagtggcttcatctgtcaagtgggatctgtcacaccagccatacttatctctctgtgctgtggaagcaacaggaatcaagagctgccctccttgtccacccacctatgtgccaactgttgtaactaggctcagagatgtgcacccatgggctctgacagaaagcagatacctcaccctgctacacatacaggatttgaactcagatctgtctgataggaatgtgaaagcacggactcttactgctaacttttgtgtatcgtaaccagccagatcctcttggttatttgtttaccacttgtattattaatgccattatcctgaattccccttgccaccccaccctccctggcgtgtggctgaggaggcctccatctcatgtatcatctggataggagcctgctggtcacagcctcctctgtctgcccttcaccccagtggccactcagcttcctacccacacctctgccagaagatcccctcaggactgcaacaggcttgtgcaacaataaatgttggcttgga

SEQ ID NO: 2060 - protein, 457 aa, Homo sapien
MRPPSPLPARWLCVLAGALAWALGPAGGQAARLQEECDYVQMIEVQHKQCLEEAQLENETIGCSKMWDNLTCWPATPRGQVVVLACPLIFKLFSSIQGRNVSRSCTDEGWTHLEPGPYPIACGLDDKAASLDEQQTMFYGSVKTGYTIGYGLSLATLLVATAILSLFRKLHCTRNYIHMHLFISFILRAAAVFIKDLALFDSGESDQCSEGSVGCKAAMVFFQYCVMANFFWLLVEGLYLYTLLAVSFFSERKYFWGYILIGWGVPSTFTMVWTIARIHFEDYGCWDTINSSLWWIIKGPILTSILVNFILFICIIRILLQKLRPPDIRKSDSSPYSRLARSTLLLIPLFGVHYIMFAFFPDNFKPEVKMVFELVVGSFQGFVVAILYCFLNGEVQAELRRKWRRWHLQGVLGWNPKYRHPSGGSNGATCSTQVSMLTRVSPGARRSSSFQAEVSLV

SEQ ID NO: 2061 - DNA, 1927 bp, Homo sapien
taacccgccgcctccgctctccccggctgcaggcggcgtgcaggaccagcggcggccgtgcaggcggaggacttcggcgcggctcctcctgggtgtgaccccgggcgcgcccgccgcgcgacgatgagggcgcggccgcaggtctgcgaggcgctgctcttcgccctggcgctccagaccggcgtgtgctatggcatcaagtggctggcgctgtccaagacaccatcggccctggcactgaaccagacgcaacactgcaagcagctggagggtctggtgtctgcacaggtgcagctgtgccgcagcaacctggagctcatgcacacggtggtgcacgccgcccgcgaggtcatgaaggcctgtcgccgggcctttgccgacatgcgctggaactgctcctccattgagctcgcccccaactatttgcttgacctggagagagggacccgggagtcggccttcgtgtatgcgctgtcggccgccgccatcagccacgccatcgcccgggcctgcacctccggcgacctgcccggctgctcctgcggccccgtcccaggtgagccacccgggcccgggaaccgctggggaggatgtgcggacaacctcagctacgggctcctcatgggggccaagttttccgatgctcctatgaaggtgaaaaaaacaggatcccaagccaataaactgatgcgtctacacaacagtgaagtggggagacaggctctgcgcgcctctctggaaatgaagtgtaagtgccatggggtgtctggctcctgctccatccgcacctgctggaaggggctgcaggagctgcaggatgtggctgctgacctcaagacccgatacctgtcggccaccaaggtagtgcaccgacccatgggcacccgcaagcacctggtgcccaaggacctggatatccggcctgtgaaggactcggaactcgtctatctgcagagctcacctgacttctgcatgaagaatgagaaggtgggctcccacgggacacaagacaggcagtgcaacaagacatccaacggaagcgacagctgcgaccttatgtgctgcgggcgtggctacaacccctacacagaccgcgtggtcgagcggtgccactgtaagtaccactggtgctgctacgtcacctgccgcaggtgtgagcgtaccgtggagcgctatgtctgcaagtgaggccctgccctccgccccacgcaggagcgaggactctgctcaaggaccctcagcaactggggccaggggcctggagacactccatggagctctgcttgtgaattccagatgccaggcatgggaggcggcttgtgctttgccttcacttggaagccaccaggaacagaaggtctggccaccctggaaggagggcaggacatcaaaggaaaccgacaagattaaaaataacttggcagcctgaggctctggagtgcccacaggctggtgtaaggagcggggcttgggatcggtgagactgatacagacttgacctttcagggccacagagaccagcctccgggaaggggtctgcccgccttcttcagaatgttctgcgggaccccctggcccaccctggggtctgagcctgctgggcccaccacatggaatcactagcttgggttgtaaatgttttcttttgttttttgctttttcttcctttgggatgtggaagctacagaaatatttataaaacatagctttttctttggggtggcacttctcaattcctctttatatattttatatatataaatatatatgtatatatataatgatctctattttaaaactagctttttaagcagctgtatgaaataaatgctgagtgagccccagcccgcccctgcagttcccggcctcgtcaagtgaactcggcagaccctggggctggcagagggagctctccagtttccaggca

SEQ ID NO: 2062 - protein, 354 aa, Homo sapien
MRARPQVCEALLFALALQTGVCYGIKWLALSKTPSALALNQTQHCKQLEGLVSAQVQLCRSNLELMHTVVHAAREVMKACRRAFADMRWNCSSIELAPNYLLDLERGTRESAFVYALSAAAISHAIARACTSGDLPGCSCGPVPGEPPGPGNRWGGCADNLSYGLLMGAKFSDAPMKVKKTGSQANKLMRLHNSEVGRQALRASLEMKCKCHGVSGSCSIRTCWKGLQELQDVAADLKTRYLSATKVVHRPMGTRKHLVPKDLDIRPVKDSELVYLQSSPDFCMKNEKVGSHGTQDRQCNKTSNGSDSCDLMCCGRGYNPYTDRVVERCHCKYHWCCYVTCRRCERTVERYVCK

SEQ ID NO: 2063 - DNA, 2930 bp, Homo sapien
ggcacgaggggcggcggagccgactcgtcgcggccgaggcgcacgcggtccgcgccggcgtcagtctgggattggccggcccgcgacttcctccgccccctgccaatcgccggggacgacttccgtgggtttttccggctctcccgcgtcgctaaggagcgacgggctgtcggccagaccccgagttctcggtgcgctcagcggccgccgacgctaggaggccgcgctccgcccccgctaccatgaggccccggaaagccttcctgctcctgctgctcttggggctggtgcagctgctggccgtggcgggtgccgagggcccggacgaggattcttctaacagagaaaatgccattgaggatgaagaggaggaggaggaggaagatgatgatgaggaagaagacgacttggaagttaaggaagaaaatggagtcttggtcctaaatgatgcaaactttgataattttgtggctgacaaagacacagtgctgctggagttttatgctccatggtgtggacattgcaagcagtttgctccggaatatgaaaaaattgccaacatattaaaggataaagatcctcccattcctgttgccaagatcgatgcaacctcagcgtctgtgctggccagcaggtttgatgtgagtggctaccccaccatcaagatccttaagaaggggcaggctgtagactacgagggctccagaacccaggaagaaattgttgccaaggtcagagaagtctcccagcccgactggacgcctccaccagaagtcacgcttgtgttgaccaaagagaactttgatgaagttgtgaatgatgcagatatcattctggtggagttttatgccccatggtgtggacactgcaagaaacttgcccccgagtatgagaaggccgccaaggagctcagcaagcgttctcctccaattcccctggcaaaggtcgacgccaccgcagaaacagacctggccaagaggtttgatgtctctggctatcccaccctgaaaattttccgcaaaggaaggccttatgactacaacggcccacgagaaaaatatggaatcgttgattacatgatcgagcagtccgggcctccctccaaggagattctgaccctgaagcaggtccaggagttcctgaaggatggagacgatgtcatcatcatcggggtctttaagggggagagtgacccagcctaccagcaataccaggatgccgctaacaacctgagagaagattacaaatttcaccacactttcagcacagaaatagcaaagttcttgaaagtctcccaggggcagttggttgtaatgcagcctgagaaattccagtccaagtatgagccccggagccacatgatggacgtccagggctccacccaggactcggccatcaaggacttcgtgctgaagtacgccctgcccctggttggccaccgcaaggtgtcaaacgatgctaagcgctacaccaggcgccccctggtggtcgtctactacagtgtggacttcagctttgattacagagctgcaactcagttttggcggagcaaagtcctagaggtggccaaggacttccctgagtacacctttgccattgcggacgaagaggactatgctggggaggtgaaggacctggggctcagcgagagtggggaggatgtcaatgccgccatcctggacgagagtgggaagaagttcgccatggagccagaggagtttgactctgacaccctccgcgagtttgtcactgctttcaaaaaaggaaaactgaagccagtcatcaaatcccagccagtgcccaagaacaacaagggacccgtcaaggtcgtggtgggaaagacctttgactccattgtgatggaccccaagaaggacgtcctcatcgagttctacgcaccatggtgcgggcactgcaagcagctagagcccgtgtacaacagcctggccaagaagtacaagggccaaaagggcctggtcatcgccaagatggacgccactgccaacgacgtccccagcgaccgctataaggtggagggcttccccaccatctacttcgcccccagtggggacaaaaagaacccagttaaatttgagggtggagacagagatctggagcatttgagcaagtttatagaagaacatgccacaaaactgagcaggaccaaggaagagctttgaaggcctgaggtctgcggaaggtgggaggaggcagacaccctgcgtggcccatggtcggggcgtccacgccgaggccggcaacaaacgacagtatctcggattccttttttttttttttttaattttttatactttggtgtttcacttcatgctctgaatactgaataaccatgaatgactgaatagtttagtccagatttttacagaggatacatctatttttatcattatttggggtttgaaaaatttttttttacaccttctaatttctttatttctcaaagcagataattcttctgtgtgaaaatgttttctttttttaatttaaggtttaaaattcctttgccaaatcatgttgattttgctctttgctttttcgttgtctgagaaattgttggcgtagatttggcttctggtatgtgtttctgattgcttcctgttgagcacaaagtgagagctgccactgagcagccctgccaggggtgctgtttcaggctgggcatcgccaggcggcctccctgcaaaccaagggctgggggcaaaggggcatgatccagggtcccccagggtgggctcagctccagggagaggccacccacgtggcagccccacctcttgagagcccccagtgccggagcagaaaggaccctggacccagaggcagatactgcggggtggtagaaaaggtagagtaggctgtggcaatggaataaaacacgattaaaaacgttaaaaaaaaaaaaaaaaaaa

SEQ ID NO: 2064 - protein, 645 aa, Homo sapien
MRPRKAFLLLLLLGLVQLLAVAGAEGPDEDSSNRENAIEDEEEEEEEDDDEEEDDLEVKEENGVLVLNDANFDNFVADKDTVLLEFYAPWCGHCKQFAPEYEKIANILKDKDPPIPVAKIDATSASVLASRFDVSGYPTIKILKKGQAVDYEGSRTQEEIVAKVREVSQPDWTPPPEVTLVLTKENFDEVVNDADIILVEFYAPWCGHCKKLAPEYEKAAKELSKRSPPIPLAKVDATAETDLAKRFDVSGYPTLKIFRKGRPYDYNGPREKYGIVDYMIEQSGPPSKEILTLKQVQEFLKDGDDVIIIGVFKGESDPAYQQYQDAANNLREDYKFHHTFSTEIAKFLKVSQGQLVVMQPEKFQSKYEPRSHMMDVQGSTQDSAIKDFVLKYALPLVGHRKVSNDAKRYTRRPLVVVYYSVDFSFDYRAATQFWRSKVLEVAKDFPEYTFAIADEEDYAGEVKDLGLSESGEDVNAAILDESGKKFAMEPEEFDSDTLREFVTAFKKGKLKPVIKSQPVPKNNKGPVKVVVGKTFDSIVMDPKKDVLIEFYAPWCGHCKQLEPVYNSLAKKYKGQKGLVIAKMDATANDVPSDRYKVEGFPTIYFAPSGDKKNPVKFEGGDRDLEHLSKFIEEHATKLSRTKEEL

SEQ ID NO: 2065 - DNA, 1638 bp, Homo sapien
ggaattccctgatatacacctggaccaccaccaatggatatacaaatggcaaacaattttactccgccctctgcaactcctcagggaaatgactgtgacctctatgcacatcacagcacggccaggatagtaatgcctctgcattacagcctcgtcttcatcattgggctcgtgggaaacttactagccttggtcgtcattgttcaaaacaggaaaaaaatcaactctaccaccctctattcaacaaatttggtgatttctgatatactttttaccaccgctttgcctacacgaatagcctactatgcaatgggctttgactggagaatcggagatgccttgtgtaggataactgcgctagtgttttacatcaacacatatgcaggtgtgaactttatgacctgcctgagtattgaccgcttcattgctgtggtgcaccctctacgctacaacaagataaaaaggattgaacatgcaaaaggcgtgtgcatatttgtctggattctagtatttgctcagacactcccactcctcatcaaccctatgtcaaagcaggaggctgaaaggattacatgcatggagtatccaaactttgaagaaactaaatctcttccctggattctgcttggggcatgtttcataggatatgtacttccacttataatcattctcatctgctattctcagatctgctgcaaactcttcagaactgccaaacaaaacccactcactgagaaatctggtgtaaacaaaaaggctctcaacacaattattcttattattgttgtgtttgttctctgtttcacaccttaccatgttgcaattattcaacatatgattaagaagcttcgtttctctaatttcctggaatgtagccaaagacattcgttccagatttctctgcactttacagtatgcctgatgaacttcaattgctgcatggacccttttatctacttctttgcatgtaaagggtataagagaaaggttatgaggatgctgaaacggcaagtcagtgtatcgatttctagtgctgtgaagtcagcccctgaagaaaattcacgtgaaatgacagaaacgcagatgatgatacattccaagtcttcaaatggaaagtgaaatggattgtattttggtttatagtgacgtaaactgtatgacaaactttgcaggacttcccttataaagcaaaataattgttcagcttccaattagtattcttttatatttctttcattgggcactttcccatctccaactcggaagtaagcccaagagaacaacataaagcaaacaacataaagcacaataaaaatgcaaataaatattttcatttttatttgtaaacgaatacaccaaaaggaggcgctcttaataactcccaatgtaaaaagttttgttttaataaaaaatttaattattatttcttgccaacaaatggctagaaaggactgaatagattatatattgccagatgttaatactgtaacatactttttaaataacatatttcttaaatccaaatttctctcaatgttagatttaattccctcaataacaccaatgttttgttttgtttcgttctgggtcataaaactttgttaaggaactcttttggaataaagagcaggatgctgc

SEQ ID NO: 2066 - protein, 361 aa, Homo sapien [sequence omitted]

SEQ ID NO: 2067 - DNA, 1559 bp, Homo sapien
gcggagcacagtccgccgagcacaagctccagcatcccgtcaggggttgcaggtgtgtgggaggcttgaaactgttacaatatggctttccttggactcttctctttgctggttctgcaaagtatggctacaggggccactttccctgaggaagccattgctgacttgtcagtgaatatgtataatcgtcttagagccactggtgaagatgaaaatattctcttctctccattgagtattgctcttgcaatgggaatgatggaacttggggcccaaggatctacccagaaagaaatccgccactcaatgggatatgacagcctaaaaaatggtgaagaattttctttcttgaaggagttttcaaacatggtaactgctaaagagagccaatatgtgatgaaaattgccaattccttgtttgtgcaaaatggatttcatgtcaatgaggagtttttgcaaatgatgaaaaaatattttaatgcagcagtaaatcatgtggacttcagtcaaaatgtagccgtggccaactacatcaataagtgggtggagaataacacaaacaatctggtgaaagatttggtatccccaagggattttgatgctgccacttatctggccctcattaatgctgtctatttcaaggggaactggaagtcgcagtttaggcctgaaaatactagaaccttttctttcactaaagatgatgaaagtgaagtccaaattccaatgatgtatcagcaaggagaattttattatggggaatttagtgatggctccaatgaagctggtggtatctaccaagtcctagaaataccatatgaaggagatgaaataagcatgatgctggtgctgtccagacaggaagttcctcttgctactctggagccattagtcaaagcacagctggttgaagaatgggcaaactctgtgaagaagcaaaaagtagaagtatacctgcccaggttcacagtggaacaggaaattgatttaaaagatgttttgaaggctcttggaataactgaaattttcatcaaagatgcaaatttgacaggcctctctgataataaggagatttttctttccaaagcaattcacaagtccttcctagaggttaatgaagaaggctcagaagctgctgctgtctcaggaatgattgcaattagtaggatggctgtgctgtatcctcaagttattgtcgaccatccatttttctttcttatcagaaacaggagaactggtacaattctattcatgggacgagtcatgcatcctgaaacaatgaacacaagtggacatgatttcgaagaactttaagttactttatttgaataacaaggaaaacagtaactaagcacattatgtttgcaactggtatatatttaggatttgtgttttacagtatatcttaagataatatttaaaatagttccagataaaaacaatatatgtaaattataagtaacttgtcaaggaatgttatcagtattaagctaatggtcctgttatgtcattgtgtttgtgtgctgttgtttaaaataaaagtacctattgaacatgtg

SEQ ID NO: 2068 - protein, 410 aa, Homo sapien
MAFLGLFSLLVLQSMATGATFPEEAIADLSVNMYNRLRATGEDENILFSPLSIALAMGMMELGAQGSTQKEIRHSMGYDSLKNGEEFSFLKEFSNMVTAKESQYVMKIANSLFVQNGFHVNEEFLQMMKKYFNAAVNHVDFSQNVAVANYINKWVENNTNNLVKDLVSPRDFDAATYLALINAVYFKGNWKSQFRPENTRTFSFTKDDESEVQIPMMYQQGEFYYGEFSDGSNEAGGIYQVLEIPYEGDEISMMLVLSRQEVPLATLEPLVKAQLVEEWANSVKKQKVEVYLPRFTVEQEIDLKDVLKALGITEIFIKDANLTGLSDNKEIFLSKAIHKSFLEVNEEGSEAAAVSGMIAISRMAVLYPQVIVDHPFFFLIRNRRTGTILFMGRVMHPETMNTSGHDFEEL

SEQ ID NO: 2069 - DNA, 3225 bp, Homo sapien
ggcggcagcgccctgccgacgccggggagggacgcaggcaggcggcgggcagcgggaggcggcaccccggtgctccccgcggctctcggcggagccccgccgcccgccgcgccatggcccgaagaccccggcacagcatatatagcagtgacgaggatgatgaggactttgagatgtgtgaccatgactatgatgggctgcttcccaagtctggaaagcgtcacttggggaaaacaaggtggacccgggaagaggatgaaaaactgaagaagctggtggaacagaatggaacagatgactggaaagttattgccaattatctcccgaatcgaacagatgtgcagtgccagcaccgatggcagaaagtactaaaccctgagctcatcaagggtccttggaccaaagaagaagatcagagagtgatagagcttgtacagaaatacggtccgaaacgttggtctgttattgccaagcacttaaaggggagaattggaaaacaatgtagggagaggtggcataaccacttgaatccagaagttaagaaaacctcctggacagaagaggaagacagaattatttaccaggcacacaagagactggggaacagatgggcagaaatcgcaaagctactgcctggacgaactgataatgctatcaagaaccactggaattctacaatgcgtcggaaggtcgaacaggaaggttatctgcaggagtcttcaaaagccagccagccagcagtggccacaagcttccagaagaacagtcatttgatgggttttgctcaggctccgcctacagctcaactccctgccactggccagcccactgttaacaacgactattcctattaccacatttctgaagcacaaaatgtctccagtcatgttccataccctgtagcgttacatgtaaatatagtcaatgtccctcagccagctgccgcagccattcagagacactataatgatgaagaccctgagaaggaaaagcgaataaaggaattagaattgctcctaatgtcaaccgagaatgagctaaaaggacagcaggtgctaccaacacagaaccacacatgcagctaccccgggtggcacagcaccaccattgccgaccacaccagacctcatggagacagtgcacctgtttcctgtttgggagaacaccactccactccatctctgccagcggatcctggctccctacctgaagaaagcgcctcgccagcaaggtgcatgatcgtccaccagggcaccattctggataatgttaagaacctcttagaatttgcagaaacactccaatttatagattctttcttaaacacttccagtaaccatgaaaactcagacttggaaatgccttctttaacttccacccccctcattggtcacaaattgactgttacaacaccatttcatagagaccagactgtgaaaactcaaaaggaaaatactgtttttagaaccccagctatcaaaaggtcaatcttagaaagctctccaagaactcctacaccattcaaacatgcacttgcagctcaagaaattaaatacggtcccctgaagatgctacctcagacaccctctcatctagtagaagatctgcaggatgtgatcaaacaggaatctgatgaatctggatttgttgctgagtttcaagaaaatggaccacccttactgaagaaaatcaaacaagaggtggaatctccaactgataaatcaggaaacttcttctgctcacaccactgggaaggggacagtctgaatacccaactgttcacgcagacctcgcctgtgcgagatgcaccgaatattcttacaagctccgttttaatggcaccagcatcagaagatgaagacaatgttctcaaagcatttacagtacctaaaaacaggtccctggcgagccccttgcagccttgtagcagtacctgggaacctgcatcctgtggaaagatggaggagcagatgacatcttccagtcaagctcgtaaatacgtgaatgcattctcagcccggacgctggtcatgtgagacatttccagaaaagcattatggttttcagaacagttcaagttgacttgggatatatcattcctcaacatgaaacttttcatgaatgggagaagaacctatttttgttgtggtacaacagttgagagcacgaccaagtgcatttagttgaatgaagtcttcttggatttcacccaactaaaaggatttttaaaaataaataacagtcttacctaaattattaggtaatgaattgtagccagttgttaatatcttaatgcagatttttttaaaaaaaaacataaaatgatttatctggtattttaaaggatccaacagatcagtattttttcctgtgatgggttttttgaaatttgacacattaaaaggtactccagtatttcacttttctcgatcactaaacatatgcatatatttttaaaaatcagtaaaagcattactctaagtgtagacttaataccatgtgacatttaatccagattgtaaatgctcatttatggttaatgacattgaaggtacatttattgtaccaaaccattttatgagttttctgttagcttgctttaaaaattattactgtaagaaatagttttataaaaaattatatttttattcagtaatttaattttgtaaatgccaaatgaaaaacgttttttgctgctatggtcttagcctgtagacatgctgctagtatcagaggggcagtagagcttggacagaaagaaaagaaacttggtgttaggtaattgactatgcactagtatttcagactttttaattttatatatatatacattttttttccttctgcaatacatttgaaaacttgtttgggagactctgcattttttattgtggtttttttgttattgttggtttatacaagcatgcgttgcacttcttttttgggagatgtgtgttgttcatgttctatgttttgttttgtgtgtagcctgactgttttataatttgggagttctcgatttgatccgcatcccctgtggtttctaagtgtatggtctcagaactgttgcatggatcctgtgtttgcaactggggagacagaaactgtggttgatagccagtcactgccttaagaacatttgatgcaagatggccagcactgaacttttgagatatgacggtgtacttactgccttgtagcaaaataaagatgtgcccttatttt

SEQ ID NO: 2070 - protein, 640 aa, Homo sapien
MARRPRHSIYSSDEDDEDFEMCDHDYDGLLPKSGKRHLGKTRWTREEDEKLKKLVEQNGTDDWKVIANYLPNRTDVQCQHRWQKVLNPELIKGPWTKEEDQRVIELVQKYGPKRWSVIAKHLKGRIGKQCRERWHNHLNPEVKKTSWTEEEDRIIYQAHKRLGNRWAEIAKLLPGRTDNAIKNHWNSTMRRKVEQEGYLQESSKASQPAVATSFQKNSHLMGFAQAPPTAQLPATGQPTVNNDYSYYHISEAQNVSSHVPYPVALHVNIVNVPQPAAAAIQRHYNDEDPEKEKRIKELELLLMSTENELKGQQVLPTQNHTCSYPGWHSTTIADHTRPHGDSAPVSCLGEHHSTPSLPADPGSLPEESASPARCMIVHQGTILDNVKNLLEFAETLQFIDSFLNTSSNHENSDLEMPSLTSTPLIGHKLTVTTPFHRDQTVKTQKENTVFRTPAIKRSILESSPRTPTPFKHALAAQEIKYGPLKMLPQTPSHLVEDLQDVIKQESDESGFVAEFQENGPPLLKKIKQEVESPTDKSGNFFCSHHWEGDSLNTQLFTQTSPVRDAPNILTSSVLMAPASEDEDNVLKAFTVPKNRSLASPLQPCSSTWEPASCGKMEEQMTSSSQARKYVNAFSARTLVM

SEQ ID NO: 2071 - DNA, 3627 bp, Homo sapien
atttacgcgttgctgaatctcctgtggacaaaccaccaataggccaggactgtcctgtggacagacggggtgagcctcttcttgtgtctggagattctgaaaagatttgatcaccaggagatttttcgggacattaccaaaccactcattttagtggctgcctccgggtgatgatggctgtgtgaacgactgccatggcccaccggaagcttgagagcgtggggagcggcatgttggaccatagggtgagaccaggtcctgtccctcacagccaggagcccgagagcgaggacatggagctgcccttggagggctatgtgcccgagggcctggagctggctgccctgcggccagagagccccgcgccagaggaacaggagtgccacaaccacagccccgatggggactccagctctgactacgtgaacaacacctctgaggaggaggactatgacgagggcctccctgaggaggaggagggcatcacctactacatccgctactgccctgaggacgacagctacctagagggcatggactgcaacggggaggagtacctggcccacagtgcacaccctgtggacactgatgagtgccaggaggcggtggaggagtggacggactcggcgggcccgcacccccacggccacgaggctgaaggcagccaggactacccagacggccaactgcccattccggaggatgagccctccgtccttgaggcccatgaccaggaagaagatggtcactactgtgccagcaaagagggctaccaggactactaccccgaggaggccaacgggaacaccggcgcctccccctaccgcctgaggcgtggggatggggacctggaggaccaggaggaggacattgaccagatcgtggcagagatcaagatgagtctgagcatgaccagcatcaccagcgccagtgaggccagccccgagcatgggcctgagccagggcctgaggactctgtagaggcctgcccacccatcaaggccagctgcagccccagcaggcacgaggcgaggcccaagtcgctgaacctccttcccgaggccaagcaccccggagacccccagagaggcttcaagcccaagaccaggaccccagaagagaggctgaagtggccccacgagcaggtttgcaatggtctggagcagccaaggaagcagcagcgctctgatctcaatggacctgttgacaataacaacattccagagacaaagaaggtggcatcatttccaagttttgtggctgttccagggccctgcgaaccagaagacctcatcgacgggatcatctttgctgccaattacctggggtccacccagctgctatcagaacggaacccttccaaaaacatcagaatgatgcaagcgcaggaggccgtcagccgggtcaagaggatgcaaaaggctgctaagatcaagaaaaaagcgaattctgagggggatgcccagacgctgacggaagtggacctcttcatttccacccagaggatcaaggttttaaatgcagacacgcaggaaaccatgatggaccacgccttgcgtaccatctcctacatcgccgacattgggaacattgtagtgctgatggccagacgccgcatgccccggtcagcctctcaggactgcatcgagaccacgcccggggcccaggaaggcaagaagcagtataagatgatctgccatgtgttcgagtcggaggatgcccagctcatcgcccagtctatcggccaggccttcagcgtggcctaccaggagttcctgcgagccaatggcatcaaccccgaagacttgagccagaaggaatacagcgacatcatcaacacccaggagatgtacaacgacgacctcatccacttctcaaactcggagaactgcaaggagctgcagctggagaagcacaagggcgagatcctgggcgtggtggtggtggagtcgggctggggctccatcctgcccacggtgatcctggccaacatgatgaatggcggcccggctgcccgctcggggaagctgagcatcggggaccagatcatgtccatcaatggcaccagcctggtggggctgcccctcgccacctgccaaggcatcatcaagggcctgaagaaccagacacaggtgaagctcaacattgtcagctgtcccccggtcaccacggtccttatcaagcggccagacctcaagtaccagctgggcttcagcgtgcagaatggaattatctgcagcctcatgagagggggcattgctgagcgagggggcgtccgtgtgggccaccgcatcatcgagatcaacgggcagagcgtggtggccacagcccacgagaagatagtccaagctctgtccaactcggtcggagagatccacatgaagaccatgcccgccgccatgttcaggctcctcacgggtcaggagaccccgctgtacatctaggccaccccagcctggccacgcagccaggacaccgggcagggccgcccgggcccagaggagctgggagccgggccgcagacttgaccccgacgccacagcccagccacggacgctggctccccaaagggtgtgccctcaccacccacttgatttttttcattttgccaaaaaggggtatgtctttatcaaaggagagtcacagaacaaatgtttgtttgtaaagcgttccaagtattttgccacgttctggactgtcttctccctgcacaagccagggtgtgtctcggtagctgtgcgtggtgtggagtgtgtgtctttcctccctgaagctgtgcggagcgaactggcgcctccgagggacgcggctcccggggcagggcagccgtcacccctgcctcccgcccccttggctgggacgtctggggtcctgtggggcccccacaatggtcccaaacagctgcctctgccactgactgcagggacacgggcagcctggctcccaggacacgacttgtaatgaaagtttggggacatgtgattgattgattgattgattgtaaataaaggatgatggccacaacatgaaaactccatatttatttagatgctattattactgtttggacttttattttggcaggcttttttccagactctagggttttccaatgtgactaatgaccacacctgcctctcccgtcgtctcttctgggcaccctcccacccggctgcatacccgggcagggctcccacagagacaaggagggcacaggtgtctgccccctctttaaaatcgatctacacacatccacgcacatgcgaccccgaggaaacgaaacccactctagaaaacgcgaccttggccgcacctaaagcagccagccgtgagtgcagaccccttggccagcgtggcgcagtggccctgagcagtagtggcatgtgtgtagatcaagtcggatctagtccagctcggttcattagcgatccatgtaatctgacgtcatcttgtctcgaagtctctttttttggcccaggccttgaagaatacactgtgacttaagaagccttaccacgcagtaactaaagctttaggatgactgtattcgaggagtgccgtgtgttgcatgcagctacccgtaggaagacttcgcgcatatcactaataaacctgaagtcgtgatga

SEQ ID NO: 2072 - protein, 748 aa, Homo sapien
MAHRKLESVGSGMLDHRVRPGPVPHSQEPESEDMELPLEGYVPEGLELAALRPESPAPEEQECHNHSPDGDSSSDYVNNTSEEEDYDEGLPEEEEGITYYIRYCPEDDSYLEGMDCNGEEYLAHSAHPVDTDECQEAVEEWTDSAGPHPHGHEAEGSQDYPDRQLPIPEMSPPSLRPMTRKKMVTMCQQRGLPGLLPRGGQREHRRLPLPPEAGDGDLEDQEEDIDQIVAEIKMSLSMTSITSASEASPEHGPEPGPEDSVEACPPIKASCSPSRHEARPKSLNLLPEAKHPGDPQRGFKPKTRTPEERLKWPHEQVCNGLEQPRKQQRSDLNGPVDNNNIPETKKVASFPSFVAVPGPCEPEDLIDGIIFAANYLGSTQLLSERNPSKNIRMMQAQEAVSRVKRMQKAAKIKKKANSEGDAQTLTEVDLFISTQRIKVLNADTQETMMDHALRTISYIADIGNIVVLMARRRMPRSASQDCIETTPGAQEGKKQYKMICHVFESEDAQLIAQSIGQAFSVAYQEFLRANGINPEDLSQKEYSDIINTQEMYNDDLIHFSNSENCKELQLEKHKGEILGVVVVESGWGSILPTVILANMMNGCPAARSGKLSIGDQIMSINGTSLVGLPLATCQGIIKGLKNQTQVKLNIVSCPPVTTVLIKRPDLKYQLGFSVQNGIICSLMRGGIAERGGVRVGHRIIEINGQSVVATAHEKIVQALSNSVGEIHMKTMPAAMFRLLTGQETPLYI

SEQ ID NO: 2073 - DNA, 3162 bp, Homo sapien
gaattccattttaagttatacaaaactgattaccataagtgcggtcgactgcttttatttttacgttgtgtgtgttggaaaaatgctaaaacatcagtctacaattctatatattgttattaaagattaatccaaccagcaacccaaggacatataagcgatttccactattgcatcagagcactcggcaggaaaggcctagccacggggaacattagaagctacagaagcattgcagagaagagaagatcccccgcgcgtccgccgctgttctaaggagagaagtgggggccccccaggctcgcgcgtggagcgaagcagcatgggcagtcggtgcgcgctggccctggcggtgctctcggccttgctgtgtcaggtctggagctctggggtgttcgaactgaagctgcaggagttcgtcaacaagaaggggctgctggggaaccgcaactgctgccgcgggggcgcggggccaccgccgtgcgcctgccggaccttcttccgcgtgtgcctcaagcactaccaggccagcgtgtcccccgagccgccctgcacctacggcagcgccgtcacccccgtgctgggcgtcgactccttcagtctgcccgacggcgggggcgccgactccgcgttcagcaaccccatccgcttccccttcggcttcacctggccgggcaccttctctctgattattgaagctctccacacagattctcctgatgacctcgcaacagaaaacccagaaagactcatcagccgcctggccacccagaggcacctgacggtgggcgaggagtggtcccaggacctgcacagcagcggccgcacggacctcaagtactcctaccgcttcgtgtgtgacgaacactactacggagagggctgctccgttttctgccgtccccgggacgatgccttcggccacttcacctgtggggagcgtggggagaaagtgtgcaaccctggctggaaagggccctactgcacagagccgatctgcctgcctggatgtgatgagcagcatggattttgtgacaaaccaggggaatgcaagtgcagagtgggctggcagggccggtactgtgacgagtgtatccgctatccaggctgtctccatggcacctgccagcagccctggcagtgcaactgccaggaaggctgggggggccttttctgcaaccaggacctgaactactgcacacaccataagccctgcaagaatggagccacctgcaccaacacgggccaggggagctacacttgctcttgccggcctgggtacacaggtgccacctgcgagctggggattgacgagtgtgaccccagcccttgtaagaacggagggagctgcacggatctcgagaacagctactcctgtacctgcccacccggcttctacggcaaaatctgtgaattgagtgccatgacctgtgcggacggcccttgctttaacgggggtcggtgctcagacagccccgatggagggtacagctgccgctgccccgtgggctactccggcttcaactgtgagaagaaaattgactactgcagctcttcaccctgttctaatggtgccaagtgtgtggacctcggtgatgcctacctgtgccgctgccaggccggcttctcggggaggcactgtgacgacaacgtggacgactgcgcctcctccccgtgcgccaacgggggcacctgccgggatggcgtgaacgacttctcctgcacctgcccgcctggctacacgggcaggaactgcagtgcccccgtcagcaggtgcgagcacgcaccctgccacaatggggccacctgccacgagaggggccacggctatgtgtgcgagtgtgcccgaggctacgggggtcccaactgccagttcctgctccccgagctgcccccgggcccagcggtggtggacctcactgagaagctagagggccagggcgggccattcccctgggtggccgtgtgcgccggggtcatccttgtcctcatgctgctgctgggctgtgccgctgtggtggtctgcgtccggctgaggctgcagaagcaccggcccccagccgacccctgccggggggagacggagaccatgaacaacctggccaactgccagcgtgagaaggacatctcagtcagcatcatcggggccacgcagatcaagaacaccaacaagaaggcggacttccacggggaccacagcgccgacaagaatggcttcaaggcccgctacccagcggtggactataacctcgtgcaggacctcaagggtgacgacaccgccgtcagggacgcgcacagcaagcgtgacaccaagtgccagccccagggctcctcaggggaggagaaggggaccccgaccacactcaggggtggagaagcatctgaaagaaaaaggccggactcgggctgttcaacttcaaaagacaccaagtaccagtcggtgtacgtcatatccgaggagaaggatgagtgcgtcatagcaactgaggtgtaaaatggaagtgagatggcaagactcccgtttctcttaaaataagtaaaattccaaggatatatgccccaacgaatgctgctgaagaggagggaggcctcgtggactgctgctgagaaaccgagttcagaccgagcaggttctcctcctgaggtcctcgacgcctgccgacagcctgtcgcggcccggccgcctgcggcactgccttccgtgacgtcgccgttgcactatggacagttgctcttaagagaatatatatttaaatgggtgaactgaattacgcataagaagcatgcactgcctgagtgtatattttggattcttatgagccagtcttttcttgaattagaaacacaaacactgcctttattgtcctttttgatacgaagatgtgctttttctagatggaaaagatgtgtgttattttttggatttgtaaaaatatttttcatgatatctgtaaagcttgagtattttgtgatgttcgttttttataatttaaattttggtaaatatgtacaaaggcacttcgggtctatgtgactatatttttttgtatataaatgtatttatggaatattgtgcaaatgttatttgagttttttactgttttgttaatgaagaaattcctttttaaaatatttttccaaaataaattttatgaggaattc

SEQ ID NO: 2074 - protein, 723 aa, Homo sapien [sequence omitted]

SEQ ID NO: 2075 - DNA, 2856 bp, Homo sapien
gtaaccgctactcccggacaccagaccaccgccttccgtacacaggggcccgcatcccaccctcccggacctaagagcctgggtcccctgtttccggaggtccgcttcccggcccccagattctggcatcccagccctcagtgtccaagacccaggcagcccgggtccccgcctcccggatccaggcgtccgggatctgcgccaccagaacctagcctcctgcagacctccgccatctgggggcactcaacctcctggagccaagggccccacgtcccacccagagaaactctcgtattcccagctcctagggccaaggaacccgggcgctccgaactcccagctttcggacatctggcacacggggcagagcagagaagctcagcgcccagcctggggaatttaaacactccagcttccaagagccaaggaacttcagtgctgtgaactcacaactctaaggagccctccaaagttccagtctccaggtgctgttactcaactcagtcctaggaacgtcgggtcctgggaaggagcccaagcgctcccagccagcttccaggcgctaagaaaccccggtgcttcccatcatggtggccgatcctcctcgagactccaaggggctcgcagcggcggagcccaccgccaacgggggcctggcgctggcctccatcgaggaccaaggcgcggcagcaggcggctactgcggttcccgggaccaggtgcgccgctgccttcgagccaacctgcttgtgctgctgacagtggtggccgtggtggccggcgtggcgctgggactgggggtgtcgggggccgggggtgcgctggcgttgggcccggagcgcttgagcgccttcgtcttcccgggcgagctgctgctgcgtctgctgcggatgatcatcttgccgctggtggtgtgcagcttgatcggcggcgccgccagcctggaccccggcgcgctcggccgtctgggcgcctgggcgctgctctttttcctggtcaccacgctgctggcgtcggcgctcggagtgggcttggcgctggctctgcagccgggcgccgcctccgccgccatcaacgcctccgtgggagccgcgggcagtgccgaaaatgcccccagcaaggaggtgctcgattcgttcctggatcttgcgagaaatatcttcccttccaacctggtgtcagcagcctttcgctcatactctaccacctatgaagagaggaatatcaccggaaccagggtgaaggtgcccgtggggcaggaggtggaggggatgaacatcctgggcttggtagtgtttgccatcgtctttggtgtggcgctgcggaagctggggcctgaaggggagctgcttatccgcttcttcaactccttcaatgaggccaccatggttctggtctcctggatcatgtggtacgcccctgtgggcatcatgttcctggtggctggcaagatcgtggagatggaggatgtgggtttactctttgcccgccttggcaagtacattctgtgctgcctgctgggtcacgccatccatgggctcctggtactgcccctcatctacttcctcttcacccgcaaaaacccctaccgcttcctgtggggcatcgtgacgccgctggccactgcctttgggacctcttccagttccgccacgctgccgctgatgatgaagtgcgtggaggagaataatggcgtggccaagcacatcagccgtttcatcctgcccatcggcgccaccgtcaacatggacggtgccgcgctcttccagtgcgtggccgcagtgttcattgcacagctcagccagcagtccttggacttcgtaaagatcatcaccatcctggtcacggccacagcgtccagcgtgggggcagcgggcatccctgctggaggtgtcctcactctggccatcatcctcgaagcagtcaacctcccggtcgaccatatctccttgatcctggctgtggactggctagtcgaccggtcctgtaccgtcctcaatgtagaaggtgacgctctgggggcaggactcctccaaaattatgtggaccgtacggagtcgagaagcacagagcctgagttgatacaagtgaagagtgagctgcccctggatccgctgccagtccccactgaggaaggaaaccccctcctcaaacactatcgggggcccgcaggggatgccacggtcgcctctgagaaggaatcagtcatgtaaaccccgggagggaccttccctgccctgctgggggtgctctttggacactggattatgaggaatggataaatggatgagctagggctctgggggtctgcctgcacactctggggagccaggggccccagcaccctccaggacaggagatctgggatgcctggctgctggagtacatgtgttcacaagggttactcctcaaaacccccagttctcactcatgtccccaactcaaggctagaaaacagcaagatggagaaataatgttctgctgcgtccccaccgtgacctgcctggcctcccctgtctcagggagcaggtcacaggtcaccatggggaattctagcccccactggggggatgttacaacaccatgctggttattttggcggctgtagttgtggggggatgtgtgtgtgcacgtgtgtgtgtgtgtgtgtgtgtgtgtgtgtgtgtgttctgtgacctcctgtccccatggtacgtcccaccctgtccccagatcccctattccctccacaataacagaaacactcccagggactctggggagaggctgaggacaaatacctgctgtcactccagaggacattttttttagcaataaaattgagtgtcaactatttaaaaaaaaaaaaaaaaa

SEQ ID NO: 2076 - protein, 541 aa, Homo sapien
MVADPPRDSKGLAAAEPTANGGLALASIEDQGAAAGGYCGSRDQVRRCLRANLLVLLTVVAVVAGVALGLGVSGAGGALALGPERLSAFVFPGELLLRLLRMIILPLVVCSLIGGAASLDPGALGRLGAWALLFFLVTTLLASALGVGLALALQPGAASAAINASVGAAGSAENAPSKEVLDSFLDLARNIFPSNLVSAAFRSYSTTYEERNITGTRVKVPVGQEVEGMNILGLVVFAIVFGVALRKLGPEGELLIRFFNSFNEATMVLVSWIMWYAPVGIMFLVAGKIVEMEDVGLLFARLGKYILCCLLGHAIHGLLVLPLIYFLFTRKNPYRFLWGIVTPLATAFGTSSSSATLPLMMKCVEENNGVAKHISRFILPIGATVNMDGAALFQCVAAVFIAQLSQQSLDFVKIITILVTATASSVGAAGIPAGGVLTLAIILEAVNLPVDHISLILAVDWLVDRSCTVLNVEGDALGAGLLQNYVDRTESRSTEPELIQVKSELPLDPLPVPTEEGNPLLKHYRGPAGDATVASEKESVM

SEQ ID NO: 2077 - DNA, 2412 bp, Homo sapien
caggccaggactccacaaggctggtcccctgccctggagcaacttaaacaggccctctggccagcctggaaccctgagatggcctccagctcaggcagcagtcctcgcccggcccctgatgagaatgagtttccctttgggtgccctcccaccgtctgccaggacccaaaggagcccagggctctctgctgtgcaggctgtctctctgagaacccgaggaatggcgaggatcagatctgccccaaatgcagaggggaagacctccagtctataagcccaggaagccgtcttcgaactcaggagaaggctcaccccgaggtggctgaggctggaattgggtgcccctttgcaggtgtcggctgctccttcaagggaagcccacagtctgtgcaagagcatgaggtcacctcccagacctcccacctaaacctgctgttggggttcatgaaacagtggaaggcccggctgggctgtggcctggagtctgggcccatggccctggagcagaacctgtcagacctgcagctgcaggcagccgtggaagtggcgggggacctggaggtcgattgctaccgggcaccctgctccgagagccaggaggagctggccctgcagcacttcatgaaggagaagcttctggctgagctggaggggaagctgcgtgtgtttgagaacattgttgctgtcctcaacaaggaggtggaggcctcccacctggccctggccacctctatccaccagagccagctggaccgtgagcgcatcctgagcttggagcagagggtggtggagcttcagcagaccctggcccagaaagaccaggccctgggcaagctggagcagagcttgcgcctcatggaggaggcctccttcgatggcactttcctgtggaagatcaccaatgtcaccaggcggtgccatgagtcggcctgtggcaggaccgtcagcctcttctccccagccttctacactgccaagtatggctacaagttgtgcctgcggctgtacctgaatggagatggcactggaaagagaacccatctgtcgctcttcatcgtgatcatgagaggggagtatgatgcgctgctgccgtggcctttccggaacaaggtcaccttcatgctgctggaccagaacaaccgtgagcacgccattgacgccttccggcctgacctaagctcagcgtccttccagaggccccagagtgaaaccaacgtggccagtggatgcccactcttcttccccctcagcaaactgcagtcacccaagcacgcctacgtgaaggacgacacaatgttcctcaagtgcattgtggagaccagcacttagggtgggcggggctcctgagggagctccaactcagaagggagctagccagaggactgtgatgccctgcccttggcacccaagacctcagggcacaaagatgggtgaaggctggcatgatccaagcaagactgaggggtcgacttcgggctggccatctggttaggatggcaggacgtgggctgggcccacaaaggcaaagggtccagaaggagacaggcagagctgctcccctctgcacggaccatgcgacactgggaggccagtgagccactccggccccgaatgttgaggtggactctcaccaaatgagaagaaaatggaaccaggcttggaaccgtaggacccaagcagagaagctctcgggctaggaagatctctgcagggccgccagggagacctggacacaggcctgctctctttttctccagggtcagaaacaggaccgggtggaagggatggggtgccagtttgaatgcagtctgtccaggctcgtcattggaggtgaacaagcaaacccagagggctccactaggacttcaaattgggggttggatttgaagacttttaagtttccttccagcccagaaagtctctcattctaggcctcctggcccaggtgagtcctagagctacaggggttctggaaacattcaggagcttcctgtcctcccagctcctcactcaccttcagtaacccccactggactgacctggtccacagggcacctgccaccctgggcctggcagctcagcttccccaacacgcaggagcacacccagcccccacatcctgtgcctccatcagctaaacaccacgtcacttcatgcaggtgaaacccagtcactgtgagctcccaggtgcagccagaggcacctcaagaagaagaggggcataaactttcctcttcctgcctagaggccccacctttggtgctttccagaatcccgtaacacctgattaactgaggcatccacttctttcagcagactgatcaggacctccaagccactgagcaatgtataaccccaaagaaataatttttagaatctctttcgaagttttcctaaaaaaaaaaaaaaaaa

SEQ ID NO: 2078 - protein, 416 aa, Homo sapien
MASSSGSSPRPAPDENEFPFGCPPTVCQDPKEPRALCCAGCLSENPRNGEDQICPKCRGEDLQSISPGSRLRTQEKAHPEVAEAGIGCPFAGVGCSFKGSPQSVQEHEVTSQTSHLNLLLGFMKQWKARLGCGLESGPMALEQNLSDLQLQAAVEVAGDLEVDCYRAPCSESQEELALQHFMKEKLLAELEGKLRVFENIVAVLNKEVEASHLALATSIHQSQLDRERILSLEQRVVELQQTLAQKDQALGKLEQSLRLMEEASFDGTFLWKITNVTRRCHESACGRTVSLFSPAFYTAKYGYKLCLRLYLNGDGTGKRTHLSLFIVIMRGEYDALLPWPFRNKVTFMLLDQNNREHAIDAFRPDLSSASFQRPQSETNVASGCPLFFPLSKLQSPKHAYVKDDTMFLKCIVETST

SEQ ID NO: 2079 - DNA, 2236 bp, Homo sapien
cctggcccggtcgcggtcgcggctctttccagctcctggcagccgggcacccgaaggaacgggtcgtgcaacgacgcagctggacctggcccagccatggaccgaaaagtggcccgagaattccggcataaggtggattttctgattgaaaatgatgcagagaaggactatctctatgatgtgctgcgaatgtaccaccagaccatggacgtggccgtgctcgtgggagacctgaagctggtcatcaatgaacccagccgtctgcctctgtttgatgccattcggccgctgatcccactgaagcaccaggtggaatatgatcagctgaccccccggcgctccaggaagctgaaggaggtgcgtctggaccgtctgcaccccgaaggcctcggcctgagtgtgcgtggtggcctggagtttggctgtgggctcttcatctcccacctcatcaaaggcggtcaggcagacagcgtcgggctccaggtaggggacgagatcgtccggatcaatggatattccatctcctcctgtacccatgaggaggtcatcaacctcattcgaaccaagaaaactgtgtccatcaaagtgagacacatcggcctgatccccgtgaaaagctctcctgatgagcccctcacttggcagtatgtggatcagtttgtgtcggaatctgggggcgtgcgaggcagcctgggctcccctggaaatcgggaaaacaaggagaagaaggtcttcatcagcctggtaggctcccgaggccttggctgcagcatttccagcggccccatccagaagcctggcatctttatcagccatgtgaaacctggctccctgtctgctgaggtgggattggagataggggaccagattgtcgaagtcaatggcgtcgacttctctaacctggatcacaaggaggctgtaaatgtgctgaaaaatagccgcagcctgaccatctccattgtagctgcagctggccgggagctgttcatgacagaccgggagcggctggcagaggcgcggcagcgtgagctgcagcggcaggagcttctcatgcagaagcggctggcgatggagtccaacaagatcctccaggagcagcaggagatggagcggcaaaggagaaaagaaattgcccagaaggcagcagaggaaaatgagagataccggaaggagatggaacagattgtagaggaggaagagaagtttaagaagcaatgggaagaagactggggctcaaaggaacagctactcttgcctaaaaccatcactgctgaggtacacccagtaccccttcgcaagccaaagtatgatcagggagtggaacctgagctcgagcccgcagatgacctggatggaggcacggaggagcagggagagcaggatttccggaaatatgaggaaggctttgacccctactctatgttcaccccagagcagatcatggggaaggatgtccggctcctacgcatcaagaaggagggatccttagacctggccctggaaggcggtgtggactcccccattgggaaggtggtcgtttctgctgtgtatgagcggggagctgctgagcggcatggtggcattgtgaaaggggacgagatcatggcaatcaacggcaagattgtgacagactacaccctggctgaggctgacgctgccctgcagaaggcctggaatcagggcggggactggatcgaccttgtggttgccgtctgccccccaaaggagtatgacgatgagctgaccttcttgctgaagtccaaaaggggaaaccaaattcacgcgttaggaaacagtgagctccggccccacctcgtgaacacaaagcctcggaccagccttgagagaggccacatgacacacaccagatggcatccttgggacctgaatctatcacccaggaatctcaaactccctttggccctgaaccagggccagataaggaacagctcgggccacttttttgaaggccaatgtggaggaaagggagcagccagccgtttgggagaagatctcaaggatccagactctcattcctttcctctggcccagtgaatttggtctctcccagctttgggggactccttccttgaaccctaataagaccccactggagtctctctctctccatccctctcctctgccctctgctctaattgctgccaggattgtcactccaaaccttactctgagctcattaataaaataaacagatttattttccagcttaaaaaaa

SEQ ID NO: 2080 - protein, 652 aa, Homo sapien
MDRKVAREFRHKVDFLIENDAEKDYLYDVLRMYHQTMDVAVLVGDLKLVINEPSRLPLFDAIRPLIPLKHQVEYDQLTPRRSRKLKEVRLDRLHPEGLGLSVRGGLEFGCGLFISHLIKGGQADSVGLQVGDEIVRINGYSISSCTHEEVINLIRTKKTVSIKVRHIGLIPVKSSPDEPLTWQYVDQFVSESGGVRGSLGSPGNRENKEKKVFISLVGSRGLGCSISSGPIQKPGIFISHVKPGSLSAEVGLEIGDQIVEVNGVDFSNLDHKEAVNVLKNSRSLTISIVAAAGRELFMTDRERLAEARQRELQRQELLMQKRLAMESNKILQEQQEMERQRRKEIAQKAAEENERYRKEMEQIVEEEEKFKKQWEEDWGSKEQLLLPKTITAEVHPVPLRKPKYDQGVEPELEPADDLDGGTEEQGEQDFRKYEEGFDPYSMFTPEQIMGKDVRLLRIKKEGSLDLALEGGVDSPIGKVVVSAVYERGAAERHGGIVKGDEIMAINGKIVTDYTLAEADAALQKAWNQGGDWIDLVVAVCPPKEYDDELTFLLKSKRGNQIHALGNSELRPHLVNTKPRTSLERGHMTHTRWHPWDLNLSPRNLKLPLALNQGQIRNSSGHFFEGQCGGKGAASRLGEDLKDPDSHSFPLAQ

SEQ ID NO: 2081 - DNA, 3477 bp, Homo sapien
cagagggctgctggctggctaagtccctcccgctcccggctctcgcctcactaggagcggctctcggtgcagcgggacagggcgaagcggcctgcgcccacggagcgcgcgacactgcccggaagggaccgccacccttgccccctcagctgcccactcgtgatttccagcggcctccgcgcgcgcacgatgccctcggccaccagccacagcgggagcggcagcaagtcgtccggaccgccaccgccgtcgggttcctccgggagtgaggcggccgcgggagccggggccgccgcgccggcttctcagcaccccgcaaccggcaccggcgctgtccagaccgaggccatgaagcagattctcggggtgatcgacaagaaacttcggaacctggagaagaaaaagggtaagcttgatgattaccaggaacgaatgaacaaaggggaaaggcttaatcaagatcagctggatgccgtttctaagtaccaggaagtcacaaataatttggagtttgcaaaagaattacagaggagtttcatggcactaagtcaagatattcagaaaacaataaagaagacagcacgtcgggagcagcttatgagagaagaagctgaacagaaacgtttaaaaactgtacttgagctacagtatgttttggacaaattgggagatgatgaagtgcggactgacctgaaacaaggtttgaatggagtgccaatattgtccgaagaggagttgtcattgttggatgaattctataagctagtagaccctgaacgggacatgagcttgaggttgaatgaacagtatgaacatgcctccattcacctgtgggacctgctggaagggaaggaaaaacctgtatgtggaaccacctataaagttctaaaggaaattgttgagcgtgtttttcagtcaaactactttgacagcacccacaaccaccagaatgggctgtgtgaggaagaagaggcagcctcagcacctgcagttgaagaccaggtacctgaagctgaacctgagccagcagaagagtacactgagcaaagtgaagttgaatcaacagagtatgtaaatagacagttcatggcagaaacacagttcaccagtggtgaaaaggagcaggtagatgagtggacagttgaaacggttgaggtggtaaattcactccagcagcaacctcaggctgcatccccttcagtaccagagccccactctttgactccagtggctcaggcagatccccttgtgagaagacagcgagtacaagaccttatggcacaaatgcagggtccctataatttcatacaggattcaatgctggattttgaaaatcagacacttgatcctgccattgtatctgcacagcctatgaatccaacacaaaacatggacatgccccagctggtttgccctccagttcattctgaatctagacttgctcagcctaatcaagttcctgtacaaccagaagcgacacaggttcctttggtatcatccacaagtgaggggtacacagcatctcaacccttgtaccagccttctcatgctacagagcaacgaccacagaaggaaccaattgatcagattcaggcaacaatctctttaaatacagaccagactacagcatcatcatcccttcctgctgcgtctcagcctcaagtatttcaggctgggacaagcaaacctttacatagcagtggaatcaatgtaaatgcagctccattccaatccatgcaaacggtgttcaatatgaatgccccagttcctcctgttaatgaaccagaaactttaaaacagcaaaatcagtaccaggccagttataaccagagcttttctagtcagcctcaccaagtagaacaaacagagcttcagcaagaacagcttcaaacagtggttggcacttaccatggttccccagaccagtcccatcaagtgactggtaaccaccagcagcctcctcagcagaacactggatttccacgtagcaatcagccctattacaatagtcgtggtgtgtctcgtggaggctcccgtggtgctagaggcttgatgaatggataccggggccctgccaatggattcagaggaggatatgatggttaccgcccttcattctctaacactccaaacagtggttatacacagtctcagttcagtgctccccgggattactctggctatcaacgggatggatatcagcagaatttcaagcgaggctctgggcagagtggaccacggggagccccacgaggtcgtggagggcccccaagacccaacagagggatgccgcaaatgaacactcagcaagtgaattaatctgattcacaggattatgtttaatcgccaaaaacacactggccagtgtaccataatatgttaccagaagagttattatctatttgttctccctttcaggaaacttattgtaaagggactgttttcatcccataaagacaggactacaattgtcagctttctattacctggatatggaaggaaactatttttactctgcatgttctgtcctaagcgtcatcttgagccttgcacatgatactcagattcctcacccttgcttaggagtaaaacaatatactttacagggtgataataatctccatagttatttgaagtggcttgaaaaaggcaagattgacttttatgacattggataaaatctacaaatcagccctcgagttattcaatgataactgacaaactaaattatttccctagaaaggaagatgaaaggagtggagtgtggtttggcagaacaactgcatttcacagcttttccagttaaattggagcactgaacgttcagatgcataccaaattatgcatgggtcctaatcacacatataaggctggctaccagctttgacacagcactgttcatctggccaaacaactgtggttaaaaacacatgtaaaatgctttttaacagctgatactgtataagacaaagccaagatgcaaaattaggctttgattggcactttttgaaaaatatgcaacaaatatgggatgtaatccggatggccgcttctgtacttaatgtgaaatatttagatacctttttgaacacttaacagtttctttgagacaatgacttttgtaaggattggtactatctatcattccttatgacatgtacattgtctgtcactaatccttggattttgctgtattgtcacctaaattggtacaggtactgatgaaaatctctagtggataatcataacactctcggtcacatgtttttccttcagcttgaaagcttttttttaaaaggaaaagataccaaatgcctgctgctaccacccttttcaattgctatcttttgaaaggcaccagtatgtgttttagattgatttccctgtttcagggaaatcacggacagtagtttcagttctgatggtataagcaaaacaaataaaacgtttataaaagttaaaaaaaaaaaaaaaaaa

SEQ ID NO: 2082 - protein, 656 aa, Homo sapien
MKQILGVIDKKLRNLEKKKGKLDDYQERMNKGERLNQDQLDAVSKYQEVTNNLEFAKELQRSFMALSQDIQKTIKKTARREQLMREEAEQKRLKTVLELQYVLDKLGDDEVRTDLKQGLNGVPILSEEELSLLDEFYKLVDPERDMSLRLNEQYEHASIHLWDLLEGKEKPVCGTTYKVLKEIVERVFQSNYFDSTHNHQNGLCEEEEAASAPAVEDQVPEAEPEPAEEYTEQSEVESTEYVNRQFMAETQFTSGEKEQVDEWTVETVEVVNSLQQQPQAASPSVPEPHSLTPVAQADPLVRRQRVQDLMAQMQGPYNFIQDSMLDFENQTLDPAIVSAQPMNPTQNMDMPQLVCPPVHSESRLAQPNQVPVQPEATQVPLVSSTSEGYTASQPLYQPSHATEQRPQKEPIDQIQATISLNTDQTTASSSLPAASQPQVFQAGTSKPLHSSGINVNAAPFQSMQTVFNMNAPVPPVNEPETLKQQNQYQASYNQSFSSQPHQVEQTELQQEQLQTVVGTYHGSPDQSHQVTGNHQQPPQQNTGFPRSNQPYYNSRGVSRGGSRGARGLMNGYRGPANGFRGGYDGYRPSFSNTPNSGYTQSQFSAPRDYSGYQRDGYQQNFKRGSGQSGPRGAPRGRGGPPRPNRGMPQMNTQQVN

SEQ ID NO: 2083 - DNA, 2546 bp, Homo sapien
cagcggcggcccaggaggcagccggtgagcgcctgcgagcagagtggcgggggccgctgacaggtcccgcgcagcccagcccagcccagccacgcggctcacaggtggggtccaagagcagtttggagcaacccggcgctacggagaggggtggacggctctgcacgggcctcctgtctcccgctcgggcagagggactcggggggacctcgctccttggccgagagaacctgaactcgggcggagagaacgcgcccaggcgggcaaggggaccagagaaagccggggctggaagtcactgtcgctcgccactgtctggagcgcacggagcgcagaggcccggcagccgcgcgtgccctcccggggaccgagccagtgatgcaggatcgctgagcggagatccgcgccgagaagtctctcggggccggggctgagacgcacgccttcgacaccgctgccaagaccccgattccggcgactcttgcggggaaccgaggggccaaggctgccccaagctcaggacttgggcgagtctaagacgatggtttcttaagcacggacccgcgttccccttcccgccccctcgactggaggcagggatcctgcgcggggcccccgggattccgtttccccgcggagccccggccgctgcctcccgggacagttcgcacggccacaggggcgcacggcgatgtggcctccgtccagcgcgctggcccgccggggggatgctctggcacctgtcggggtccaggcctagcatggccggcgcgttgcccgacgtcgcctccggctaggatggcccctccgggcccggccagtgccctctccacctcggccgagccgctgtcccgcagcatcttccggaagttcttgctgatgctctgctccctgctcacgtccctttacgtcttctactgcctggccgagcgctgccagaccctgtccggccccgtcgtggggctgtccggcggcggcgaggaggcgggggcccctggtggcggcgtcctggccggaggcccgagggagctggcggtgtggccggcggcggcacagagaaagcgcctcctgcaactgccgcagtggcggaggcgccggccgcccgcgccccgcgacgacggcgaggaggcggcctgggaagaagagtcccctggcctgtcagggggtccgggcggctccggggccggaagcaccgtggccgaggccccgccggggaccctggcgctgctcctggacgaaggcagcaagcagctgccgcaggccatcatcatcggagtgaagaagggcggcacgcgggcgctgctggagttcctgcgcgtgcaccccgacgtgcgcgccgtgggcgccgagccccacttcttcgaccgcagctacgacaagggcctcgcctggtaccgggacctgatgcccagaaccctggacgggcagatcaccatggagaagacgcccagttacttcgtcacgcgggaggcccccgcgcgcatctcggccatgtccaaggacaccaagctcatcgtggtggtgcgggacccggtgaccagggccatctcggactacacgcagacgctgtccaagcggcccgacatccccaccttcgagagcttgacgttcaaaaacaggacagcgggcctcatcgacacgtcgtggagcgccatccagatcggcatctacgccaagcacctggagcactggctgcgccacttccccatccgccagatgctcttcgtgagcggcgagcggctcatcagcgacccggccggggagctgggccgcgtgcaagacttcctgggcctcaagaggatcatcacggacaagcacttctacttcaacaagaccaagggcttcccctgcctgaagaaggcggagggcagcagccggccccattgcctgggcaagaccaagggcaggacccatcctgagatcgaccgcgaggtggtgcgcaggctgcgcgagttctaccggcctttcaacctcaagttctaccagatgaccgggcacgactttggctgggatggataaccatataatttaaaaagaaaaaaaaaatcaaaatataatatatttttttaccaatcggtagagaagagacagtttaatatttgtgctgaaaatatgtttcagtatttttttcaatgaatgttaagagattgttctcactcccgccccatcttaatgtataaccaacaccaaacacgtggatcaacagaaaaggaaaatttcactcgtctaaacactttcaattttcagtttttattttatgttctatatacccagtcataaagtataagcatcagttgtcattaaaagttttcagaaaatcttgaggttaaacatctctctctctttttttaaaatacaaggccctgataaaattgatatctatccttatatttttctccctttttcccgtgccactttttcttaaattatttcccagttagtattatcatatgtttgtacccgtcacagttttcatagtgctttcaaatacacctttttgatcattaaaataaaaaaataaatcttggaaaaaaaaaaaaaaaaaa

SEQ ID NO: 2084 - protein, 406 aa, Homo sapien
MAPPGPASALSTSAEPLSRSIFRKFLLMLCSLLTSLYVFYCLAERCQTLSGPVVGLSGGGEEAGAPGGGVLAGGPRELAVWPAAAQRKRLLQLPQWRRRRPPAPRDDGEEAAWEEESPGLSGGPGGSGAGSTVAEAPPGTLALLLDEGSKQLPQAIIIGVKKGGTRALLEFLRVHPDVRAVGAEPHFFDRSYDKGLAWYRDLMPRTLDGQITMEKTPSYFVTREAPARISAMSKDTKLIVVVRDPVTRAISDYTQTLSKRPDIPTFESLTFKNRTAGLIDTSWSAIQIGIYAKHLEHWLRHFPIRQMLFVSGERLISDPAGELGRVQDFLGLKRIITDKHFYFNKTKGFPCLKKAEGSSRPHCLGKTKGRTHPEIDREVVRRLREFYRPFNLKFYQMTGHDFGWDG

SEQ ID NO: 2085 - DNA, 1100 bp, Homo sapien
ctaaagctgggttggtagctcctacctactgtgtggcaagaaggtatgggtcatgaacagaaccaaggagctgcgctgctacagatgttaccacttctgtggctgctaccccactcctgggccgtccctgaagctcctactccaatgtggccagatgacctgcaaaaccacacattcctgcacacagtgtactgccaggatgggagtcccagtgtgggactctctgaggcctacgacgaggaccagcttttcttcttcgacttttcccagaacactcgggtgcctcgcctgcccgaatttgctgactgggctcaggaacagggagatgctcctgccattttatttgacaaagagttctgcgagtggatgatccagcaaatagggccaaaacttgatgggaaaatcccggtgtccagagggtttcctatcgctgaagtgttcacgctgaagcccctggagtttggcaagcccaacactttggtctgttttgtcagtaatctcttcccacccatgctgacagtgaactggcagcatcattccgtccctgtggaaggatttgggcctacttttgtctcagctgtcgatggactcagcttccaggccttttcttacttaaacttcacaccagaaccttctgacattttctcctgcattgtgactcacgaaattgaccgctacacagcaattgcctattgggtaccccggaacgcactgccctcagatctgctggagaatgtgctgtgtggcgtggcctttggcctgggtgtgctgggcatcatcgtgggcattgttctcatcatctacttccggaagccttgctcaggtgactgattcttccagaccagagtttgatgccagcagcttcggccatccaaacagaggatgctcagatttctcacatcctgcccaggatctcctcttagggtagaagaagtctctgggacatccctggggtgtgtgtgtagatttcccacctggggactctgctgtccctgggcttgcatcccagggatcccagagtggcctgcctatcacaaccacatcccttccccccacaaggcaataaatctcatttctttaaaaaaaaaaaaaaaaaaaaa

SEQ ID NO: 2086 - protein, 261 aa, Homo sapien
MGHEQNQGAALLQMLPLLWLLPHSWAVPEAPTPMWPDDLQNHTFLHTVYCQDGSPSVGLSEAYDEDQLFFFDFSQNTRVPRLPEFADWAQEQGDAPAILFDKEFCEWMIQQIGPKLDGKIPVSRGFPIAEVFTLKPLEFGKPNTLVCFVSNLFPPMLTVNWQHHSVPVEGFGPTFVSAVDGLSFQAFSYLNFTPEPSDIFSCIVTHEIDRYTAIAYWVPRNALPSDLLENVLCGVAFGLGVLGIIVGIVLIIYFRKPCSGD

SEQ ID NO: 2087 - DNA, 3198 bp, Homo sapien
ttgggaggagcagtctctccgctcgtctcccggagctttctccattgtctctgcctttacaacagagggagacgatggactgagctgatccgcaccatggagtctcgggtcttactgagaacattctgtttgatcttcggtctcggagcagtttgggggcttggtgtggacccttccctacagattgacgtcttaacagagttagaacttggggagtccacgaccggagtgcgtcaggtcccggggctgcataatgggacgaaagcctttctctttcaagatactcccagaagcataaaagcatccactgctacagctgaacagttttttcagaagctgagaaataaacatgaatttactattttggtgaccctaaaacagacccacttaaattcaggagttattctctcaattcaccacttggatcacaggtacctggaactggaaagtagtggccatcggaatgaagtcagactgcattaccgctcaggcagtcaccgccctcacacagaagtgtttccttacattttggctgatgacaagtggcacaagctctccttagccatcagtgcttcccatttgattttacacattgactgcaataaaatttatgaaagggtagtagaaaagccctccacagacttgcctctaggcacaacattttggctaggacagagaaataatgcgcatggatattttaagggtataatgcaagatgtccaattacttgtcatgccccagggatttattgctcagtgcccagatcttaatcgcacctgtccaacttgcaatgacttccatggacttgtgcagaaaatcatggagctacaggatattttagccaaaacatcagccaagctgtctcgagctgaacagcgaatgaatagattggatcagtgctattgtgaaaggacttgcaccatgaagggaaccacctaccgagaatttgagtcctggatagacggctgtaagaactgcacatgcctgaatggaaccatccagtgtgaaactctaatctgcccaaatcctgactgcccacttaagtcggctcttgcgtatgtggatggcaaatgctgtaaggaatgcaaatcgatatgccaatttcaaggacgaacctactttgaaggagaaagaaatacagtctattcctcttctggagtatgtgttctctatgagtgcaaggaccagaccatgaaacttgttgagagttcaggctgtccagctttggattgtccagagtctcatcagataaccttgtctcacagctgttgcaaagtttgtaaaggttatgacttttgttctgaaaggcataactgcatggagaattccatctgcagaaatctgaatgacagggctgtttgtagctgtcgagatggttttagggctcttcgagaggataatgcctactgtgaagacatcgatgagtgtgctgaagggcgccattactgtcgtgaaaatacaatgtgtgtcaacaccccgggttcttttatgtgcatctgcaaaactggatacatcagaattgatgattattcatgtacagaacatgatgagtgtatcacaaatcagcacaactgtgatgaaaatgctttatgcttcaacactgttggaggacacaactgtgtttgcaagccgggctatacagggaatggaacgacatgcaaagcattttgcaaagatggctgtaggaatggaggagcctgtattgccgctaatgtgtgtgcctgcccacaaggcttcactggacccagctgtgaaacggacattgatgaatgctctgatggttttgttcaatgtgacagtcgtgctaattgcattaacctgcctggatggtaccactgtgagtgcagagatggctaccatgacaatgggatgttttcaccaagtggagaatcgtgtgaagatattgatgagtgtgggaccgggaggcacagctgtgccaatgataccatttgcttcaatttggatggcggatatgattgtcgatgtcctcatggaaagaattgcacaggggactgcatccatgatggaaaagttaagcacaatggtcagatttgggtgttggaaaatgacaggtgctctgtgtgctcatgtcagaatggattcgttatgtgtcgacggatggtctgtgactgtgagaatcccacagttgatcttttttgctgccctgaatgtgacccaaggcttagtagtcagtgcctccatcaaaatggggaaactttgtataacagtggtgacacctgggtccagaattgtcaacagtgccgctgcttgcaaggggaagttgattgttggcccctgccttgcccagatgtggagtgtgaattcagcattctcccagagaatgagtgctgcccgcgctgtgtcacagacccttgccaggctgacaccatccgcaatgacatcaccaagacttgcctggacgaaatgaatgtggttcgcttcaccgggtcctcttggatcaaacatggcactgagtgtactctctgccagtgcaagaatggccacatctgttgctcagtggatccacagtgccttcaggaactgtgaagttaactgtctcatgggagatttctgttaaaagaatgttctttcattaaaagaccaaaaagaagttaaaacttaaattgggtgatttgtgggcagctaaatgcagctttgttaatagctgagtgaactttcaattatgaaatttgtggagcttgacaaaatcacaaaaggaaaattactggggcaaaattagacctcaagtctgcctctactgtgtctcacatcaccatgtagaagaatgggcgtacagtatataccgtgacatcctgaaccctggatagaaagcctgagcccattggatctgtgaaagcctctagcttcactggtgcagaaaattttcctctagatcagaatcttcagaatcagttaggttcctcactgcaagaaataaaatgtcaggcagtgaatgaattatattttcagaagtaaagcaaagaagctataacatgttatgtacagtacactctgaaaagaaatctgaaacaagttattgtaatgataaaaataatgcacaggcatggttacttaatattttctaacaggaaaagtcatccctatttccttgttttactgcacttaatattatttggttgaatttgttcagtataagctcgttcttgtgcaaaattaaataaatatttctcttacctt

SEQ ID NO: 2088 - protein, 816 aa, Homo sapien
MESRVLLRTFCLIFGLGAVWGLGVDPSLQIDVLTELELGESTTGVRQVPGLHNGTKAFLFQDTPRSIKASTATAEQFFQKLRNKHEFTILVTLKQTHLNSGVILSIHHLDHRYLELESSGHRNEVRLHYRSGSHRPHTEVFPYILADDKWHKLSLAISASHLILHIDCNKIYERVVEKPSTDLPLGTTFWLGQRNNAHGYFKGIMQDVQLLVMPQGFIAQCPDLNRTCPTCNDFHGLVQKIMELQDILAKTSAKLSRAEQRMNRLDQCYCERTCTMKGTTYREFESWIDGCKNCTCLNGTIQCETLICPNPDCPLKSALAYVDGKCCKECKSICQFQGRTYFEGERNTVYSSSGVCVLYECKDQTMKLVESSGCPALDCPESHQITLSHSCCKVCKGYDFCSERHNCMENSICRNLNDRAVCSCRDGFRALREDNAYCEDIDECAEGRHYCRENTMCVNTPGSFMCICKTGYIRIDDYSCTEHDECITNQHNCDENALCFNTVGGHNCVCKPGYTGNGTTCKAFCKDGCRNGGACIAANVCACPQGFTGPSCETDIDECSDGFVQCDSRANCINLPGWYHCECRDGYHDNGMFSPSGESCEDIDECGTGRHSCANDTICFNLDGGYDCRCPHGKNCTGDCIHDGKVKHNGQIWVLENDRCSVCSCQNGFVMCRRMVCDCENPTVDLFCCPECDPRLSSQCLHQNGETLYNSGDTWVQNCQQCRCLQGEVDCWPLPCPDVECEFSILPENECCPRCVTDPCQADTIRNDITKTCLDEMNVVRFTGSSWIKHGTECTLCQCKNGHICCSVDPQCLQEL

SEQ ID NO: 2089 - DNA, 1550 bp, Homo sapien
gtagtggtgccgacttcctgttgtttgaggccgggttgggggtgtgcgattgtgtgggacggtctggggcagcccagcagcggctgaccctctgcctgcggggaagggagtcgccaggcggccgtcatggcggtgtcggagagccagctcaagaaaatggtgtccaagtacaaatacagagacctaactgtacgtgaaactgtcaatgttattactctatacaaagatctcaaacctgttttggattcatatgtttttaacgatggcagttccagggaactaatgaacctcactggaacaatccctgtgccttatagaggtaatacatacaatattccaatatgcctatggctactggacacatacccatataatccccctatctgttttgttaagcctactagttcaatgactattaaaacaggaaagcatgttgatgcaaatgggaagatatatcttccttatctacatgaatggaaacacccacagtcagacttgttggggcttattcaggtcatgattgtggtatttggagatgaacctccagtcttctctcgtcctatttcggcatcctatccgccataccaggcaacggggccaccaaatacttcctacatgccaggcatgccaggtggaatctctccatacccatccggataccctcccaatcccagtggttacccaggctgtccttacccacctggtggtccatatcctgccacaacaagttctcagtacccttctcagcctcctgtgaccactgttggtcccagtagggatggcacaatcagcgaggacaccatccgagcctctctcatctctgcggtcagtgacaaactgagatggcggatgaaggaggaaatggatcgtgcccaggcagagctcaatgccttgaaacgaacagaagaagacctgaaaaagggtcaccagaaactggaagagatggttacccgtttagatcaagaagtagccgaggttgataaaaacatagaacttttgaaaaagaaggatgaagaactcagttctgctctggaaaaaatggaaaatcagtctgaaaacaatgatatcgatgaagttatcattcccacagctcccttatacaaacagatcctgaatctgtatgcagaagaaaacgctattgaagacactatcttttacttgggagaagccttgagaaggggcgtgatagacctggatgtcttcctgaagcatgtacgtcttctgtcccgtaaacagttccagctgagggcactaatgcaaaaagcaagaaagactgccggtctcagtgacctctactgacttctctgataccagctggaggttgagctcttcttaaagtattcttctcttccttttatcagtaggtgcccagaataagttattgcagtttatcattcaagtgtaaaatattttgaatcaataatatattttctgttttcttttggtaaagactggcttttattaatgcactttctatcctctgtaaactttttgtgctgaatgttgggactgctaaataaaatttgttgcataaaaaaaaaaaaaaaaaa

SEQ ID NO: 2090 - protein, 390 aa, Homo sapien
MAVSESQLKKMVSKYKYRDLTVRETVNVITLYKDLKPVLDSYVFNDGSSRELMNLTGTIPVPYRGNTYNIPICLWLLDTYPYNPPICFVKPTSSMTIKTGKHVDANGKIYLPYLHEWKHPQSDLLGLIQVMIVVFGDEPPVFSRPISASYPPYQATGPPNTSYMPGMPGGISPYPSGYPPNPSGYPGCPYPPGGPYPATTSSQYPSQPPVTTVGPSRDGTISEDTIRASLISAVSDKLRWRMKEEMDRAQAELNALKRTEEDLKKGHQKLEEMVTRLDQEVAEVDKNIELLKKKDEELSSALEKMENQSENNDIDEVIIPTAPLYKQILNLYAEENAIEDTIFYLGEALRRGVIDLDVFLKHVRLLSRKQFQLRALMQKARKTAGLSDLY

SEQ ID NO: 2091 - DNA, 777 bp, Homo sapien
ggccccttgtctgcagagatggctcccaatgcttcctgcctctgtgtgcatgtccgttccgaggaatgggatttaatgacctttgatgccaacccatatgacagcgtgaaaaaaatcaaagaacatgtccggtctaagaccaaggttcctgtgcaggaccaggttcttttgctgggctccaagatcttaaagccacggagaagcctctcatcttatggcattgacaaagagaagaccatccaccttaccctgaaagtggtgaagcccagtgatgaggagctgcccttgtttcttgtggagtcaggtgatgaggcaaagaggcacctcctccaggtgcgaaggtccagctcagtggcacaagtgaaagcaatgatcgagactaagacgggtataatccctgagacccagattgtgacttgcaatggaaagagactggaagatgggaagatgatggcagattacggcatcagaaagggcaacttactcttcctggcatcttattgtattggagggtgaccaccctggggatggggtgttggcaggggtcaaaaagcttatttcttttaatctcttactcaacgaacacatcttctgatgatttcccaaaattaatgagaatgagatgagtagagtaagatttgggtgggatgggtaggatgaagtatattgcccaactctatgtttctttgattctaacacaattaattaagtgacatgatttttactaatgtattactgagactagtaaataaatttttaaggcaaaatagagcattc

SEQ ID NO: 2092 - protein, 165 aa, Homo sapien
MAPNASCLCVHVRSEEWDLMTFDANPYDSVKKIKEHVRSKTKVPVQDQVLLLGSKILKPRRSLSSYGIDKEKTIHLTLKVVKPSDEELPLFLVESGDEAKRHLLQVRRSSSVAQVKAMIETKTGIIPETQIVTCNGKRLEDGKMMADYGIRKGNLLFLASYCIGG

SEQ ID NO: 2093 - DNA, 1953 bp, Homo sapien
gcagaccttgcttcatgagcaagctcatctctggaacaaactggcaaagcatctctgctggtgttcatcagaacagacaccatggcagagcatgattaccatgaagactatgggttcagcagtttcaatgacagcagccaggaggagcatcaagacttcctgcagttcagcaaggtctttctgccctgcatgtacctggtggtgtttgtctgtggtctggtggggaactctctggtgctggtcatatccatcttctaccataagttgcagagcctgacggatgtgttcctggtgaacctacccctggctgacctggtgtttgtctgcactctgcccttctgggcctatgcaggcatccatgaatgggtgtttggccaggtcatgtgcaagagcctactgggcatctacactattaacttctacacgtccatgctcatcctcacctgcatcactgtggatcgtttcattgtagtggttaaggccaccaaggcctacaaccagcaagccaagaggatgacctggggcaaggtcaccagcttgctcatctgggtgatatccctgctggtttccttgccccaaattatctatggcaatgtctttaatctcgacaagctcatatgtggttaccatgacgaggcaatttccactgtggttcttgccacccagatgacactggggttcttcttgccactgctcaccatgattgtctgctattcagtcataatcaaaacactgcttcatgctggaggcttccagaagcacagatctctaaagatcatcttcctggtgatggctgtgttcctgctgacccagatgcccttcaacctcatgaagttcatccgcagcacacactgggaatactatgccatgaccagctttcactacaccatcatggtgacagaggccatcgcatacctgagggcctgccttaaccctgtgctctatgcctttgtcagcctgaagtttcgaaagaacttctggaaacttgtgaaggacattggttgcctcccttaccttggggtctcacatcaatggaaatcttctgaggacaattccaagactttttctgcctcccacaatgtggaggccaccagcatgttccagttataggccttgccagggtttcgagaagctgctctggaatttgcaagtcatggctgtgccctcttgatgtggtgaggcaggctttgtttatagcttgcgcattctcatggagaagttatcagacactctggctggtttggaatgcttcttctcaggcatgaacatgtactgttctcttcttgaacactcatgctgaaagcccaagtagggggtctaaaatttttaaggactttccttcctccatctccaagaatgctgaaaccaagggggatgacatgtgactcctatgatctcaggttctccttgattgggactggggctgaaggttgaagaggtgagcacggccaacaaagctgttgatggtaggtggcacactgggtgcccaagctcagaaggctcttctgactactgggcaaagagtgtagatcagagcagcagtgaaaacaagtgctggcaccaccaggcacctcacagaaatgagatcaggctctgcctcaccttggggcttgacttttgtataggtagatgttcagattgctttgattaatccagaataactagcaccagggactatgaatgggcaaaactgaattataagaggctgataattccagtggtccatggaatgcttgaaaaatgtgcaaaacagcgtttaagactgtaatgaatctaagcagcatttctgaagtggactctttggtggctttgcattttaaaaatgaaattttccaatgtctgccacacaaacgtatgtaaatgtatatacccacacacatacacacatatgtcatatattactagcatatgagtttcatagctaagaaataaaactgttaaagtctccaaact

SEQ ID NO: 2094 - protein, 342 aa, Homo sapien
MAEHDYHEDYGFSSFNDSSQEEHQDFLQFSKVFLPCMYLVVFVCGLVGNSLVLVISIFYHKLQSLTDVFLVNLPLADLVFVCTLPFWAYAGIHEWVFGQVMCKSLLGIYTINFYTSMLILTCITVDRFIVVVKATKAYNQQAKRMTWGKVTSLLIWVISLLVSLPQIIYGNVFNLDKLICGYHDEAISTVVLATQMTLGFFLPLLTMIVCYSVIIKTLLHAGGFQKHRSLKIIFLVMAVFLLTQMPFNLMKFIRSTHWEYYAMTSFHYTIMVTEAIAYLRACLNPVLYAFVSLKFRKNFWKLVKDIGCLPYLGVSHQWKSSEDNSKTFSASHNVEATSMFQL

SEQ ID NO: 2095 - DNA, 1432 bp, Homo sapien
cggagcgcgagcagagcgagacccccaggtcctgcgggcgcggaatatcctggaaccttcttttgtttgtcagcagccaaggtgtttccaggaagttcagagagaacagaatttaagaagtgcaacatggccaggggctgcctctgctgcttgaagtacatgatgttcctcttcaatttgatattctggctctgtggctgtgggctgctgggagtgggcatctggctctccgtgtcccaaggcaactttgccaccttctcccccagcttcccttcgttgtctgcagccaacctggtcattgccataggcaccattgtcatggtgacgggcttcctcggctgcctgggggccatcaaggaaaacaagtgcctcctcctcagctttttcatcgtcctgttggtcatcctcctagcagagctgatcttactcatcctcttctttgtctacatggacaaggtgaacgagaacgccaagaaggacctgaaggaaggcctgctgctgtaccacaccgagaacaacgtggggctgaagaacgcctggaacatcatccaggctgagatgcgatgctgtggtgtcactgactacacagactggtacccagtgctgggggagaacacggttcccgaccgctgctgcatggagaactcccagggctgcgggcgcaacgccaccacgcctttgtggagaacgggctgctatgaaaaggtgaagatgtggttcgatgacaataagcacgtgctgggcacggtggggatgtgcatcctcatcatgcagatcctgggcatggccttctccatgaccctcttccagcacatccaccggactggtaagaagtacgacgcatgagcgggctggccgggagtgcccaccccgccctgctgccctgtggagggaagaggattgagctttgtgtcacctgcctgcgctctccagatatgacccctgcacccaccccccacagcctgccctaccccacctaccctgcctcagcctcggacttctcagtgggtggagtgccagggaggaggaggcacacggagacctggggctcggggcccctggattcctgcatctgcatatgcgtatttgccaaagacgacagggtgggctggggtgcgctccggaggaacccccggcactgatgggcttctgcccctgcccttcctcacactgacactttgtccccacatggggtggggagcagagtgcccgccccgtggagataccgccccagcgggggctgcgacatccatggccaccatggggcacctggcggggcgggggtctgccggcctctgggcaaggcccctggagcatctcgcccaggctttttataccttacaatgtaacttttttattttattttactctatgattattcaggaatattatctctcagataagtttagggttaaaaaaaaaaaaaaaaaaa

SEQ ID NO: 2096 - protein, 239 aa, Homo sapien
MARGCLCCLKYMMFLFNLIFWLCGCGLLGVGIWLSVSQGNFATFSPSFPSLSAANLVIAIGTIVMVTGFLGCLGAIKENKCLLLSFFIVLLVILLAELILLILFFVYMDKVNENAKKDLKEGLLLYHTENNVGLKNAWNIIQAEMRCCGVTDYTDWYPVLGENTVPDRCCMENSQGCGRNATTPLWRTGCYEKVKMWFDDNKHVLGTVGMCILIMQILGMAFSMTLFQHIHRTGKKYDA

SEQ ID NO: 2097 - DNA, 1741 bp, Homo sapien
ttggaacacctggcgagtcctcggtgtcggtggccggcagtcatctcgcggccgttcagaattataaggctgtctgcagagatttgaaaaatggcaacaaatgaaagtgtcagcatctttagttcagcatccttggctgtggaatatgtagattcacttttacctgagaatcctctgcaagaaccatttaaaaatgcttggaactatatgttgaataattatacaaagttccagattgcaacatggggatcccttatagttcatgaagccctttatttcttattctgtttacctggatttttatttcaatttataccttatatgaaaaaatacaaaattcaaaaggataagccagagacatgggaaaaccaatggaagtgtttcaaagttcttctctttaatcacttctgtatccagctgcctttgatttgtggaacctattattttacagagtatttcaatattccttatgattgggaaagaatgccaagatggtattttcttttggcaagatgctttggttgtgcagtcattgaagatacttggcactattttctgcatagactcttacaccacaaaagaatatacaagtatattcataaagttcatcatgagtttcaggctccatttggaatggaagctgaatatgcacatcctttggagactctaattcttggaactggatttttcattggaatcgtgcttttgtgtgatcatgtaattcttctttgggcatgggtgaccattcgtttattagaaactattgatgtccatagtggttatgatattcctctcaaccctttaaatctgatccctttctatgctggttctcggcatcatgatttccaccacatgaacttcattggaaactatgcttcaacatttacatggtgggatcgaatttttggaacagactctcagtataatgcctataatgaaaagaggaagaagtttgagaaaaagactgaataaatatctcacgtaaaccttcctgaaagataaacgttttcctgaattcagaaactagtagctaacattgcttctggagagcagaaataagcatgtcttctggctactaagtgataaaaagaacattaacaacctttaattaccttcctagtgggaactttttctactttacctacaagttctatatatgtagaaatgaataaatatatatttaagtacagttttcatgaggaagttttaaaagaccatgttcctaagcttccaagaaggttttggatactagaagtattaatctatggcttttctcccagtaaaaccataggcctgaagttcacattgggtctttaaatcttttagatatatactggtcatttcagaaaattcttcatagtggtattggccttatatttaactttttttttattttttttttgagacaaagccacactctgtctccttgtctggagtgtggtggcacagtctcagctcactgcaacctctgcctcccagttcaagcaattcttctgcctcagcctcccaagtagctgggattacaggcacccgccaccacgcccagctaatttttgtatttttgtagagatggggtttctcgatgttggccaggctggtctcaaacttctgacctcaagtgatctgcccaccttggcctcccaaagtgctgggattacaggtgtaagccactgcgcccggcctttttaactttaaacatgttttagaattcacctaaagatcaaaatatcatggattgaac

SEQ ID NO: 2098 - protein, 293 aa, Homo sapien
MATNESVSIFSSASLAVEYVDSLLPENPLQEPFKNAWNYMLNNYTKFQIATWGSLIVHEALYFLFCLPGFLFQFIPYMKKYKIQKDKPETWENQWKCFKVLLFNHFCIQLPLICGTYYFTEYFNIPYDWERMPRWYFLLARCFGCAVIEDTWHYFLHRLLHHKRIYKYIHKVHHEFQAPFGMEAEYAHPLETLILGTGFFIGIVLLCDHVILLWAWVTIRLLETIDVHSGYDIPLNPLNLIPFYAGSRHHDFHHMNFIGNYASTFTWWDRIFGTDSQYNAYNEKRKKFEKKTE

SEQ ID NO: 2099 - DNA, 1153 bp, Homo sapien
gccgccgccgccatgaacattttccggctgactggggacctgtcccacctggcggccatcgtcatcctgctgctgaagatctggaagacgcgctcctgcgccggtatttctgggaaaagccagcttctgtttgcactggtcttcacaactcgttacctggatctttttacttcatttatttcattgtataacacatctatgaaggttatctaccttgcctgctcctatgccacagtgtacctgatctacctgaaatttaaggcaacctacgatggaaatcatgataccttccgagtggagtttctggtggtccctgtgggaggcctctcatttttagttaatcacgatttctctcctcttgagatcctctggaccttctccatctacctggagtccgtggctatccttccgcagctgtttatgatcagcaagactggggaggccgagaccatcaccacccactacctgttcttcctgggcctctatcgtgctttgtatcttgtcaactggatctggcgcttctactttgagggcttctttgacctcattgctgtggtggccggcgtagtccagaccatcctatactgtgacttcttctacttgtacattacaaaagtactcaagggaaagaagctcagtttgccagcataagtgccaaagaccatcaccagcatctgtccttcagggtgctcggacagaattcttaccacagcaaaggcataagatgcttgatacggaaaatcagaaacttaactcttttgttgcagatagtcatcagtggctctgtaaaaacgcagaggaaaagagccagaaggtttctgtttaatgcatcttgccttatctttttttattactgtgtacaaagatttttttacacaaagaaacttaatgctgtattaataaattcagtgtgtagcttcaattgggatagttccaaaagtgaagattttgtgaggaataagtgcaaattttttttttattttaaaaaattctttgaaactcttaagtctttgtgtctgcaatgaaattgtactccttgacagttgatagattatgtattcttccatccctcaaacttgcattccactatatttattttttggcaaaagatgagctgtatttgtttgaaatctgagacactatgttcaattgg

SEQ ID NO: 2100 - protein, 212 aa, Homo sapien
MNIFRLTGDLSHLAAIVILLLKIWKTRSCAGISGKSQLLFALVFTTRYLDLFTSFISLYNTSMKVIYLACSYATVYLIYLKFKATYDGNHDTFRVEFLVVPVGGLSFLVNHDFSPLEILWTFSIYLESVAILPQLFMISKTGEAETITTHYLFFLGLYRALYLVNWIWRFYFEGFFDLIAVVAGVVQTILYCDFFYLYITKVLKGKKLSLPA

SEQ ID NO: 2101 - DNA, 1770 bp, Homo sapien
gaggagtggattacatattccaacagttgttattacattggtaaggaaagaagaacttgggaagaaagagtttgctggcctgtgcttcgaagaactctgatctgctttctatagataatgaggaagaaatggtatgtgtggggacttcccagttggctgtaagttgccatttgaactaaacgaaatagatcaggaactgaggacatatctaaattttctagttttatagaaggcttttatccacaagaatcaagatcttccctctctgagcaggaatcctttgtgcattgaagactttagattcctctctgcggtagacgtgcacttataagtatttgatggggtggattcgtggtcggaggtctcgacacagctgggagatgagtgaatttcataattataacttggatctgaagaagagtgatttttcaacacgatggcaaaagcaaagatgtccagtagtcaaaagcaaatgtagagaaaatgcatctccattttttttctgctgcttcatcgctgtagccatgggaatccgtttcattattatggtagcaatatggagtgctgtattcctaaactcattattcaaccaagaagttcaaattcccttgaccgaaagttactgtggcccatgtcctaaaaactggatatgttacaaaaataactgctaccaattttttgatgagagtaaaaactggtatgagagccaggcttcttgtatgtctcaaaatgccagccttctgaaagtatacagcaaagaggaccaggatttacttaaactggtgaagtcatatcattggatgggactagtacacattccaacaaatggatcttggcagtgggaagatggctccattctctcacccaacctactaacaataattgaaatgcagaagggagactgtgcactctatgcctcgagctttaaaggctatatagaaaactgttcaactccaaatacatacatctgcatgcaaaggactgtgtaaagatgatcaaccatctcaataaaagccaggaacagagaagagattacaccagcggtaacactgccaaccgagactaaaggaaacaaacaaaaacaggacaaaatgaccaaagactgtcagatttcttagactccacaggaccaaaccatagaacaatttcactgcaaacatgcatgattctccaagacaaaagaagagagatcctaaaggcaattcagatatccccaaggctgcctctcccaccacaagcccagagtggatgggctgggggaggggtgctgttttaatttctaaaggtaggaccaacacccaggggatcagtgaaggaagagaaggccagcagatcagtgagagtgcaaccccaccctccacaggaaattgcctcatgggcagggccacagcagagagacacagcatgggcagtgccttccctgcctgtgggggtcatgctgccacttttaatgggtcctccacccaacggggtcagggaggtggtgctgccccagtgggccatgattatcttaaaggcattattctccagccttaagatcttaggacgtttcctttgctatgatttgtacttgcttgagtcccatgactgtttctcttcctctctttcttccttttggaatagtaatatccatcctatgtttgtcccactattgtattttggaagcacataacttgtttggtttcacaggttcacagttaagaaggaattttgcctctgaataaatagaatcttgagtctcatgcaaaaaaaaaaaaaaaaaaaaaaaaa

SEQ ID NO: 2102 - protein, 216 aa, Homo sapien
MGWIRGRRSRHSWEMSEFHNYNLDLKKSDFSTRWQKQRCPVVKSKCRENASPFFFCCFIAVAMGIRFIIMVAIWSAVFLNSLFNQEVQIPLTESYCGPCPKNWICYKNNCYQFFDESKNWYESQASCMSQNASLLKVYSKEDQDLLKLVKSYHWMGLVHIPTNGSWQWEDGSILSPNLLTIIEMQKGDCALYASSFKGYIENCSTPNTYICMQRTV

SEQ ID NO: 2103 - DNA, 2744 bp, Homo sapien
ctcgtgccgaattcggcacgagaccgcgtgttcgcgcctggtagagatttctcgaagacaccagtgggcccgtgtggaaccaaacctgcgcgcgtggccgggccgtgggacaacgaggccgcggagacgaaggcgcaatggcgaggaagttatctgtaatcttgatcctgacctttgccctctctgtcacaaatccccttcatgaactaaaagcagctgctttcccccagaccactgagaaaattagtccgaattgggaatctggcattaatgttgacttggcaatttccacacggcaatatcatctacaacagcttttctaccgctatggagaaaataattctttgtcagttgaagggttcagaaaattacttcaaaatataggcatagataagattaaaagaatccatatacaccatgaccacgaccatcactcagaccacgagcatcactcagaccatgagcgtcactcagaccatgagcatcactcagaccacgagcatcactctgaccataatcatgctgcttctggtaaaaataagcgaaaagctctttgcccagaccatgactcagatagttcaggtaaagatcctagaaacagccaggggaaaggagctcaccgaccagaacatgccagtggtagaaggaatgtcaaggacagtgttagtgctagtgaagtgacctcaactgtgtacaacactgtctctgaaggaactcactttctagagacaatagagactccaagacctggaaaactcttccccaaagatgtaagcagctccactccacccagtgtcacatcaaagagccgggtgagccggctggctggtaggaaaacaaatgaatctgtgagtgagccccgaaaaggctttatgtattccagaaacacaaatgaaaatcctcaggagtgtttcaatgcatcaaagctactgacatctcatggcatgggcatccaggttccgctgaatgcaacagagttcaactatctctgtccagccatcatcaaccaaattgatgctagatcttgtctgattcatacaagtgaaaagaaggctgaaatccctccaaagacctattcattacaaatagcctgggttggtggttttatagccatttccatcatcagtttcctgtctctgctgggggttatcttagtgcctctcatgaatcgggtgtttttcaaatttctcctgagtttccttgtggcactggccgttgggactttgagtggtgatgcttttttacaccttcttccacattctcatgcaagtcaccaccatagtcatagccatgaagaaccagcaatggaaatgaaaagaggaccacttttcagtcatctgtcttctcaaaacatagaagaaagtgcctattttgattccacgtggaagggtctaacagctctaggaggcctgtatttcatgtttcttgttgaacatgtcctcacattgatcaaacaatttaaagataagaagaaaaagaatcagaagaaacctgaaaatgatgatgatgtggagattaagaagcagttgtccaagtatgaatctcaactttcaacaaatgaggagaaagtagatacagatgatcgaactgaaggctatttacgagcagactcacaagagccctcccactttgattctcagcagcctgcagtcttggaagaagaagaggtcatgatagctcatgctcatccacaggaagtctacaatgaatatgtacccagagggtgcaagaataaatgccattcacatttccacgatacactcggccagtcagacgatctcattcaccaccatcatgactaccatcatattctccatcatcaccaccaccaaaaccaccatcctcacagtcacagccagcgctactctcgggaggagctgaaagatgccggcgtcgccactttggcctggatggtgataatgggtgatggcctgcacaatttcagcgatggcctagcaattggtgctgcttttactgaaggcttatcaagtggtttaagtacttctgttgctgtgttctgtcatgagttgcctcatgaattaggtgactttgctgttctactaaaggctggcatgaccgttaagcaggctgtcctttataatgcattgtcagccatgctggcgtatcttggaatggcaacaggaattttcattggtcattatgctgaaaatgtttctatgtggatatttgcacttactgctggcttattcatgtatgttgctctggttgatatggtacctgaaatgctgcacaatgatgctagtgaccatggatgtagccgctgggggtatttctttttacagaatgctgggatgcttttgggttttggaattatgttacttatttccatatttgaacataaaatcgtgtttcgtataaatttctagttaaggtttaaatgctagagtagcttaaaaagttgtcatagtttcagtaggtcatagggagatgagtttgtatgctgtactatgcagcgtttaaagttagtgggttttgtgatttttgtattgaatattgctgtctgttacaaagtcagttaaaggtacgttttaatatttaagttattctatcttggagataaaatctgtatgtgcaattcaccggtattaccagtttattatgtaaacaagagatttggcatgacatgttctgtatgtttcagggaaaaatgtctttaatgctttttcaagaactaacacagttattcctatactggattttaggtctctgaagaactgctggtg

SEQ ID NO: 2104 - protein, 752 aa, Homo sapien
MARKLSVILILTFALSVTNPLHELKAAAFPQTTEKISPNWESGINVDLAISTRQYHLQQLFYRYGENNSLSVEGFRKLLQNIGIDKIKRIHIHHDHDHHSDHEHHSDHERHSDHEHHSDHEHHSDHNHAASGKNKRKALCPDHDSDSSGKDPRNSQGKGAHRPEHASGRRNVKDSVSASEVTSTVYNTVSEGTHFLETIETPRPGKLFPKDVSSSTPPSVTSKSRVSRLAGRKTNESVSEPRKGFMYSRNTNENPQECFNASKLLTSHGMGIQVPLNATEFNYLCPAIINQIDARSCLIHTSEKKAEIPPKTYSLQIAWVGGFIAISIISFLSLLGVILVPLMNRVFFKFLLSFLVALAVGTLSGDAFLHLLPHSHASHHHSHSHEEPAMEMKRGPLFSHLSSQNIEESAYFDSTWKGLTALGGLYFMFLVEHVLTLIKQFKDKKKKNQKKPENDDDVEIKKQLSKYESQLSTNEEKVDTDDRTEGYLRADSQEPSHFDSQQPAVLEEEEVMIAHAHPQEVYNEYVPRGCKNKCHSHFHDTLGQSDDLIHHHHDYHHILHHHHHQNHHPHSHSQRYSREELKDAGVATLAWMVIMGDGLHNFSDGLAIGAAFTEGLSSGLSTSVAVFCHELPHELGDFAVLLKAGMTVKQAVLYNALSAMLAYLGMATGIFIGHYAENVSMWIFALTAGLFMYVALVDMVPEMLHNDASDHGCSRWGYFFLQNAGMLLGFGIMLLIPYLNIKSCSYKFLVKV

SEQ ID NO: 2105 - DNA, 738 bp, Homo sapien
gtatctgtggtaaacccagtgacacgggggagatgacatacaaaaagggcaggacctgagaaagattaagctgcaggctccctgcccataaaacagggtgtgaaaggcatctcagcggctgccccaccatggctacctgggccctcctgctccttgcagccatgctcctgggcaacccaggtctggtcttctctcgtctgagccctgagtactacgacctggcaagagcccacctgcgtgatgaggagaaatcctgcccgtgcctggcccaggagggcccccagggtgacctgttgaccaaaacacaggagctgggccgtgactacaggacctgtctgacgatagtccaaaaactgaagaagatggtggataagcccacccagagaagtgtttccaatgctgcgacccgggtgtgtaggacggggaggtcacgatggcgcgacgtctgcagaaatttcatgaggaggtatcagtctagagttacccagggcctcgtggccggagaaactgcccagcagatctgtgaggacctcaggttgtgtataccttctacaggtcccctctgagccctctcaccttgtcctgtggaagaagcacaggctcctgtcctcagatcccgggaacctcagcaacctctgccggctcctcgcttcctcgatccagaatccactctccagtctccctcccctgactccctctgctgtcctcccctctcacgagaataaagtgtcaagcaag

SEQ ID NO: 2106 - protein, 145 aa, Homo sapien
MATWALLLLAAMLLGNPGLVFSRLSPEYYDLARAHLRDEEKSCPCLAQEGPQGDLLTKTQELGRDYRTCLTIVQKLKKMVDKPTQRSVSNAATRVCRTGRSRWRDVCRNFMRRYQSRVTQGLVAGETAQQICEDLRLCIPSTGPL

SEQ ID NO: 2107 - DNA, 2116 bp, Homo sapien
cggttctccaagcacccagcatcctgctagacgcgccgcgcaccgacggaggggacatgggcagagcaatggtggccaggctggggctggggctgctgctgctggcactgctcctacccacgcagatttattccagtgaaacaacaactggaacttcaagtaactcctcccagagtacttccaactctgggttggccccaaatccaactaatgccaccaccaaggcggctggtggtgccctgcagtcaacagccagtctcttcgtggtctcactctctcttctgcatctctactcttaagagactcaggccaagaaacgtcttctaaatttccccatcttctaaacccaatccaaatggcgtctggaagtccaatgtggcaaggaaaaacaggtcttcatcgaatctactaattccacaccttttattgacacagaaaatgttgagaatcccaaatttgattgatttgaagaacatgtgagaggtttgactagatgatgaatgccaatattaaatctgctggagtttcatgtacaagatgaaggagaggcaacatccaaaatagttaagacatgatttccttgaatgtggcttgagaaatatggacacttaatactaccttgaaaataagaatagaaataaaggatgggattgtggaatggagattcagttttcattggttcattaattctataaggccataaaacaggtaatataaaaagcttccatcgatctatttatatgtacatgagaaggaatccccaggtgttactgtaattcctcaacgtattgtttcgacggcactaatttaatgccgatatactctagatgaatgtttacattgttgagctattgctgttctcttgggaactgaactcactttcctcctgaggctttggatttgacattgcatttgaccttttaggtagtaattgacatgtgccagggcaatgatgaatgagaatctaccccagatccaagcatcctgagcaactcttgattatccatattgagtcaaatggtaggcatttcctatcacctgtttccattcaacaagagcactacattcttttagctaaacggattccaaagagtagaattgcattgaccacgactaatttcaaaatgctttttattattattattttttagacagtctcactttgtcgcccaggccggagtgcagtggtgcgatctcagatcagtgtaccatttgcctcccgggctcaagcgattctcctgcctcagcctcccaagtagctgggattacaggcacctgccaccatgcccggctaatttttgtaattttagtagagacagggtttcaccatgttgcccaggctggtttagaactcctgacctcaggtgatccacccgcctcggcctcccaaagtgctgggattacaggcttgagcccccgcgcccagccatcaaaatgctttttatttctgcatatgtttgaatactttttacaatttaaaaaaatgatctgttttgaaggcaaaattgcaaatcttgaaattaagaaggcaaaatgtaaaggagtcaaactataaatcaagtatttgggaagtgaagactggaagctaatttgcataaattcacaaacttttatactctttctgtatatacattttttttctttaaaaaacaactatggatcagaatagcaacatttagaacactttttgttatcagtcaatatttttagatagttagaacctggtcctaagcctaaaagtgggcttgattctgcagtaaatcttttacaactgcctcgacacacataaacctttttaaaaatagacactccccgaagtcttttgtttgtatggtcacacactgatgcttagatgttccagtaatctaatatggccacagtagtcttgatgaccaaagtcctttttttccatctttagaaaactacatgggaacaaacagatcgaacagttttgaagctactgtgtgtgtgaatgaacactcttgctttattccagaatgctgtacatctattttggattgtatattgtggttgtgtatttacgctttgattcatagtaacttcttatggaattgatttgcattgaacgacaaactgtaaataaaaagaaacggtg

SEQ ID NO: 2108 - protein, 80 aa, Homo sapien
MGRAMVARLGLGLLLLALLLPTQIYSSETTTGTSSNSSQSTSNSGLAPNPTNATTKAAGGALQSTASLFVVSLSLLHLYS

SEQ ID NO: 2109 - DNA, 2331 bp, Homo sapien
cttcgcggcttggtaacataaaagtttgtttcaccacgtaagccggacctcgcactccggtcccggtctcgtcgccaagatggtgaagcccaagtacaaaggacggagcaccatcaacccgtccaaggccagcacaaacccagatcgagtgcagggagcaggaggccaaaacatgagggaccgggccaccatccggcgcctgaatatgtataggcaaaaggagcgcaggaacagtcgtggtaaaataattaaacccctgcaatatcaatcaacggtggcttctggcacagtggcaagagtagagccaaatattaaatggtttggaaacacacgtgtgattaagcagtcatcattacaaaaatttcaagaggaaatggatacagttatgaaggatccatacaaagttgtcatgaagcaaagcaagttaccaatgtctcttctccatgatcgaatccggcctcataacttgaaggtgcacattcttgatactgaaagttttgaaactacatttggccctaagtcacagaggaaacgaccaaacttatttgcaagtgatatgcagtctcttatcgaaaatgctgaaatgtccactgagagctatgaccagggcaaggatcgtgatttggtaactgaagacactggtgtgagaaatgaagctcaagaagagatctataaaaagggacagtccaaaagaatatggggtgagctctacaaggtgatagattcatcagatgttgtagttcaagttcttgatgctagagatccaatgggtactcgttcccctcacattgaaacttacctgaagaaggaaaaaccttggaaacacctcatttttgtacttaacaaatgtgaccttgttccaacctgggcaacaaaacggtgggttgctgtcctctcccaggattatccaacacttgctttccatgcaagccttactaacccgtttggcaagggagcattcattcagcttctgcggcagtttggaaagttgcacactgacaagaaacagatcagtgttgggttcattggctatccaaatgttggcaagagctctgtgataaatacattgcgttctaagaaagtttgcaacgtggctcccattgcaggtgaaacaaaggtctggcagtatattactttgatgcgtcggatattcctgattgactgtccaggtgtggtttacccctctgaggactccgagacagacattgtgctaaaaggagttgttcaagtagaaaaaattaagagtcctgaagaccacattggtgctgtacttgaacgagcaaagccagaatatatcagcaaaacatacaagattgattcttgggagaatgctgaggactttcttgagaagctcgctttccggactgggaagttactaaagggtggagagcccgacttgcagactgtgggtaagatggtcctcaatgactggcagaggggccggattcctttctttgtcaagccacccaatgcagagccacttgtggccccccagcttctaccctcctcatctttggaagttgtcccagaagcagcccagaacaatccaggggaggaagtcacagaaactgcaggtgaagggtcagaatccatcattaaggaagaaacagaagagaacagtcactgtgatgctaacacagagatgcagcagattctcacacgagttcggcagaactttggtaaaatcaacgtggtgcctcagttttctggggatgacctggttcctgtggaggtgtcagatcttgaggaagagcttgagagcttttctgatgaagaggaggaggaacaggagcaacaaagagatgatgcggaagagtcttcctcggagcctgaggaggaaaatgtgggaaacgacaccaaagccgttattaaagcactggatgagaagattgccaaatatcagaagtttctagacaaagccaaagccaaaaagttttcagcagtcagaatatccaagggactgagtgaaaagatatttgcaaaacctgaagaacaaagaaaaacactggaagaagatgtagatgacagagcaccttccaaaaagggaaagaagcggaaggcacaaagggaagaggaacaggaacattcaaataaagctcccagggcgcttacatcaaaagaacggaggcgagcagtacgacagcaacggccgaaaaaagttggtgtgcgctactatgaaacacacaacgtgaaaaataggaacaggaacaaaaagaagaccaatgactcagagggacagaaacacaaacgcaaaaaattcagacaaaagcagtaatgtttaaaaggtttttattaaattatacaaaaacaggcaaaaaaaaaaaaaaaaaa

SEQ ID NO: 2110 - protein, 731 aa, Homo sapien
MVKPKYKGRSTINPSKASTNPDRVQGAGGQNMRDRATIRRLNMYRQKERRNSRGKIIKPLQYQSTVASGTVARVEPNIKWFGNTRVIKQSSLQKFQEEMDTVMKDPYKVVMKQSKLPMSLLHDRIRPHNLKVHILDTESFETTFGPKSQRKRPNLFASDMQSLIENAEMSTESYDQGKDRDLVTEDTGVRNEAQEEIYKKGQSKRIWGELYKVIDSSDVVVQVLDARDPMGTRSPHIETYLKKEKPWKHLIFVLNKCDLVPTWATKRWVAVLSQDYPTLAFHASLTNPFGKGAFIQLLRQFGKLHTDKKQISVGFIGYPNVGKSSVINTLRSKKVCNVAPIAGETKVWQYITLMRRIFLIDCPGVVYPSEDSETDIVLKGVVQVEKIKSPEDHIGAVLERAKPEYISKTYKIDSWENAEDFLEKLAFRTGKLLKGGEPDLQTVGKMVLNDWQRGRIPFFVKPPNAEPLVAPQLLPSSSLEVVPEAAQNNPGEEVTETAGEGSESIIKEETEENSHCDANTEMQQILTRVRQNFGKINVVPQFSGDDLVPVEVSDLEEELESFSDEEEEEQEQQRDDAEESSSEPEEENVGNDTKAVIKALDEKIAKYQKFLDKAKAKKFSAVRISKGLSEKIFAKPEEQRKTLEEDVDDRAPSKKGKKRKAQREEEQEHSNKAPRALTSKERRRAVRQQRPKKVGVRYYETHNVKNRNRNKKKTNDSEGQKHKRKKFRQKQ

SEQ ID NO: 2111 - DNA, 1125 bp, Homo sapien
ggcacgagggctgccacggcatggagaatggctccgcttctgttgcagctggcggtgctcggcgcggcgctggcggccgcagccctcgtactgatttccatcgttgcatttacaactgctacaaaaatgccagcactccatcgacatgaagaagagaaattcttcttaaatgccaaaggccagaaagaaactttacccagcatatgggactcacctaccaaacaactttctgtcgttgtgccttcatacaatgaagaaaaacggttgcctgtgatgatggatgaagctctgagctatctagagaagagacagaaacgagatcctgcgttcacttatgaagtgatagtagttgatgatggcagtaaagatcagacctcaaaggtagcttttaaatattgccagaaatatggaagtgacaaagtacgtgtgataaccctggtgaagaatcgtggaaaaggtggagcgattagaatgggtatattcagttctcgaggagaaaagatccttatggcagatgctgatggagccacaaagtttccagatgttgagaaattagaaaaggggctaaatgatctacagccttggcctaatcaaatggctatagcatgtggatctcgagctcatttagaaaaagaatcaattgctcagcgttcttacttccgtactcttctcatgtatgggttccactttctggtgtggttcctttgtgtcaaaggaatcagggacacacagtgtgggttcaaattatttactcgagaagcagcttcacggacgttttcatctctacacgttgaacgatgggcatttgatgtagaactactgtacatagcacagttctttaaaattccaatagcagaaattgctgtcaactggacagaaattgaaggttctaaattagttccattctggagctggctacaaatgggtaaagacctactttttatacgacttcgatatttgactggtgcctggaggcttgagcaaactcggaaaatgaattaggttgtttgcagtcttcagttgtgttcttatgcttcagtgtcacatttcatttcatttgaaactaaaattttaagtaaagctgaaataaacttcttgtcattgaaaaaaaaaaaaaaaaaaaaa

SEQ ID NO: 2112 - protein, 324 aa, Homo sapien
MAPLLLQLAVLGAALAAAALVLISIVAFTTATKMPALHRHEEEKFFLNAKGQKETLPSIWDSPTKQLSVVVPSYNEEKRLPVMMDEALSYLEKRQKRDPAFTYEVIVVDDGSKDQTSKVAFKYCQKYGSDKVRVITLVKNRGKGGAIRMGIFSSRGEKILMADADGATKFPDVEKLEKGLNDLQPWPNQMAIACGSRAHLEKESIAQRSYFRTLLMYGFHFLVWFLCVKGIRDTQCGFKLFTREAASRTFSSLHVERWAFDVELLYIAQFFKIPIAEIAVNWTEIEGSKLVPFWSWLQMGKDLLFIRLRYLTGAWRLEQTRKMN

SEQ ID NO: 2113 - DNA, 548 bp, Homo sapien
gccttgcagaacttctacttgcctgcctccctgcctctggccatggcctgccggtgcctcagcttccttctgatggggaccttcctgtcagtttcccagacagtcctggcccagctggatgcactgctggtcttcccaggccaagtggctcaactctcctgcacgctcagcccccagcacgtcaccatcagggactacggtgtgtcctggtaccagcagcgggcaggcagtgcccctcgatatctcctctactaccgctcggaggaggatcaccaccggcctgctgacatccccgatcgattctcggcagccaaggatgaggcccacaatgcctgtgtcctcaccattagtcccgtgcagcctgaagacgacgcggattactactgctctgttggctacggctttagtccctaggggtggggtgtgagatgggtgcctcccctctgcctcccatttctgcccctgaccttgggtcccttttaaactttctctgagccttgcttcccctctgtaaaatgggttaataatattcaacatgtcaacaaaaa

SEQ ID NO: 2114 - protein, 123 aa, Homo sapien
MACRCLSFLLMGTFLSVSQTVLAQLDALLVFPGQVAQLSCTLSPQHVTIRDYGVSWYQQRAGSAPRYLLYYRSEEDHHRPADIPDRFSAAKDEAHNACVLTISPVQPEDDADYYCSVGYGFSP

SEQ ID NO: 2115 - DNA, 1824 bp, Homo sapien
gtaatcctactttatacattttaaacattattctgagaagtagtccacatggttcacttattaagaagttcacggcacacacaaaaacaaacaaaaaagaattagaaactcctgctcttataaataaaccttacaagggttaaattcagagtgattaacagtgaccagacaaccaactgactcatcaaaatcccatgtcacagctaacaagaactaagtttgcaatgaattaaatgaaaattaccttttccctatttgcaggctgctccatgtcatgtatctcattataggctgataataagtttgatgaaaccagcttattacaccaaatcaaagccaagattgaaagaaaatataacaaaagagagaattacttattttgtcaacctccaaaccagattcctattctaaaaaatcacaaataaagcaaacctaccatttgcagcaaactctaaaccaagaaaaatgatcacctttgttgcttatttcagaaagccaagataaaaagagcagaatgtgcagaaaaatatgtgctgcactagacctctggtccaaccctcacaatcatcagtactgtctgagacttccagctggttctcaaggcctccgggactcaattttcaaaggcatctgtacctccttgtcctcttgtacactcgtcttctactctcttcagcctaggactacaccacagtcattcccagctccatacctctgctctgacctgcaacaaaatgtattccacctgtccttcaagtcagttgcatgcaacctttgtcctcattgagccctccccttgtctgataagattcagaacccattaatttagcacttagttccccaaatattccactactgtttcattcagaacccaaggttcctagaaggacacaacagtcaacagttaactgaataataagagtaagagaatgcctcaaactgctgctaaactcacactaaccacaaaaaaaacaaactataataattaagtaattcctgctttaaagtgtcttctcatttcctataggcaacacagcataagactcacaacaccatctcttcaacctctctagttatttttcttcaacctaaccaccaaccagactgactacttctacattatctactgaacacatatctgttttactatttcctccactagaattctcattttcttcgtatataaaaaagtctttcaaggcacagctaaagaactacctcttctggctgggcgcagtggctcatgcctgtaatcccagcactttgggtttgttttggggggtgggagttgatcctcccacccagtctgcccctggtctctgcccatccaatcagagcccaccctcctggaagagacccccgtgttcagagtgctggcagccctgcacgtgtccagggacactgcatttcaaagaaccactgagtgggtgagctaccttgggcaaaccccccactcctgactctgactgccacgtgggtggcccgacctctgacctgctgtcatcatagaggtagaaagcaaacaatctggggctcagcacacctgggggtgctcccactcattcagtgtgtggggcccctgagcagaggctgggcattgccactagaacctgagctcctagagagcaaggacctgggtggcctcgcttactgttccagcccaggccgagcacagggcctggctcgtggcaaaccttgaataaatatttgttggctgaaaaaaaaaaaaaaaaaaaaaaaaaaaaaaaaaaaaaaaaaaaaaaaaaaaaaaaaaaaaaaaaaaaaaaaaaaaaaaaaaaaaaaaaaaaaaaaaaaaaaaaaaaa

SEQ ID NO: 2116 - protein, 90 aa, Homo sapien [sequence omitted]

SEQ ID NO: 2117 - DNA, 2014 bp, Homo sapien
cagtgcggcggatgtacggatgattcagtggctggcaggaagcccgccctgcccgcccgccagtgtcagtggtgttggcatcagcttgggcaggtgtgcgggctcaggatggggcggccgtgttgaggaaccctggactctcagagatggaatttcaccgtgttgcctaggctggtctggagctcttgatctcaagcgatcctccctgcctcggcctcccaacgtgctgggattataggcgtgagccaccgctcctggccagggtctgttcctagttgcaacagttcttggaaacccactcgagagggccacgcctccattcaccaggccacgcatcacaagaggcaacaccaggagccaacatgagctcggggactgaactgctgtggcccggagcagcgctgctggtgctgttgggggtggcagccagtctgtgtgtgcgctgctcacgcccaggtgcaaagaggtcagagaaaatctaccagcagagaagtctgcgtgaggaccaacagagctttacggggtcccggacctactccttggtcgggcaggcatggccaggacccctggcggacatggcacccacaaggaaggacaagctgttgcaattctaccccagcctggaggatccagcatcttccaggtaccagaacttcagcaaaggaagcagacacgggtcggaggaagcctacatagaccccattgccatggagtattacaactgggggcggttctcgaagcccccagaagatgatgatgccaattcctacgagaatgtgctcatttgcaagcagaaaaccacagagacaggtgcccagcaggagggcataggtggcctctgcagaggggacctcagcctgtcactggccctgaagactggccccacttctggtctctgtccctctgcctccccggaagaagatgaggaatctgaggattatcagaactcagcatccatccatcagtggcgcgagtccaggaaggtcatggggcaactccagagagaagcatcccctggcccggtgggaagcccagacgaggaggacggggaaccggattacgtgaatggggaggtggcagccacagaagcctagggcagaccaagaagaaaggagccaaggcaaagagggaccactgtgctcatggacccatcgctgccttccaaggaccatttcccagagctactcaacttttaagcccctgccatggttgctcctggaaggagaaccagccaccctgaggaccacctggccatgcgtgcacagcctgggaaaagacagttactcacgggagctgcaggcccgtcaccaagccctctcccgacccaggctttgtggggcaggcacctggtaccaagggtaacccggctcctggtatggacggatgcgcaggatttaggataagctgtcacccagtccccataacaaaaccactgtccaacactggtatctgtgttcttttgtgctatgaatttggattcctaattgctattgttggttgctggggttttaaatgattgataagcttgtacagttaacttatagagggggagccatatttaacattctggatttcagagtagagatttctgtgttgtctcctagaaagcattacatgtagtttatttcagcatccttgttgggtggggccctggctctcttcccctttggtgggacctcccctttctttgggcttcagttcactcaggaagaaatgaggctgtcgccatctttatgtgcttccagtggaaatgtcacttgctacagacaatagtgcatgagagtctagagaagtagtgaccagaacagggcagagtaggtcccctccatggccctgaatcctcctctgctccagggctggcctctgcagagctgattaaacagtgttgtgactgtctcatgggaagagctggggcccagagggaccttgagtcagaaatgttgccagaaaaagtatctcctccaaccaaaacatctcaataaaaccattttagttgaaaaaaaaaaaaaaaaaa

SEQ ID NO: 2118 - protein, 243 aa, Homo sapien
MSSGTELLWPGAALLVLLGVAASLCVRCSRPGAKRSEKIYQQRSLREDQQSFTGSRTYSLVGQAWPGPLADMAPTRKDKLLQFYPSLEDPASSRYQNFSKGSRHGSEEAYIDPIAMEYYNWGRFSKPPEDDDANSYENVLICKQKTTETGAQQEGIGGLCRGDLSLSLALKTGPTSGLCPSASPEEDEESEDYQNSASIHQWRESRKVMGQLQREASPGPVGSPDEEDGEPDYVNGEVAATEA

SEQ ID NO: 2119 - DNA, 1104 bp, Homo sapien
ggtcgcttggtggctccgtctgttgtccgtccgcccgcgggtgccatcatggcggacgcggccagtcaggtgctcctgggctccggtctcaccatcctgtcccagccgctcatgtacgtgaaagtgctcatccaggtgggatatgagcctcttcctccaacaataggacgaaatatttttgggcggcaagtgtgtcagcttcctggtctctttagttatgctcagcacattgccagtatcgatgggaggcgcgggttgttcacaggcttaactccaagactgtgttcgggagtccttggaactgtggtccatggtaaagttttacagcattaccaggagagtgacaagggtgaggagttaggacctggaaatgtacagaaagaagtctcatcttcctttgaccacgttatcaaggagacaactcgagagatgatcgctcgttctgctgctaccctcatcacacatcccttccatgtgatcactctgagatctatggtacagttcattggcagagaatccaagtactgtggactttgtgattccataataaccatctatcgggaagagggcattctaggatttttcgcgggtcttgttcctcgccttctaggtgacatcctttctttgtggctgtgtaactcactggcctacctcgtcaatacctatgcactggacagtggggtttctaccatgaatgaaatgaagagttattctcaagctgtcacaggattttttgcgagtatgttgacctatccctttgtgcttgtctccaatcttatggctgtcaacaactgtggtcttgctggtggatgccctccttactccccaatatatacgtcttggatagactgttggtgcatgctacaaaaagaggggaatatgagccgaggaaatagcttatttttccggaaggtcccctttgggaagacttattgttgtgacctgaaaatgttaatttgaagatgtggggcagggacagtgacatttctgtagtcccagatgcacagaattatgggagagaatgttgatttctatacagtgtggcgcgcttttttaataatcatttaatcttgggaaaattaaaaaaaaaaaaaaaaaaaaaaa

SEQ ID NO: 2120 - protein, 303 aa, Homo sapien
MADAASQVLLGSGLTILSQPLMYVKVLIQVGYEPLPPTIGRNIFGRQVCQLPGLFSYAQHIASIDGRRGLFTGLTPRLCSGVLGTVVHGKVLQHYQESDKGEELGPGNVQKEVSSSFDHVIKETTREMIARSAATLITHPFHVITLRSMVQFIGRESKYCGLCDSIITIYREEGILGFFAGLVPRLLGDILSLWLCNSLAYLVNTYALDSGVSTMNEMKSYSQAVTGFFASMLTYPFVLVSNLMAVNNCGLAGGCPPYSPIYTSWIDCWCMLQKEGNMSRGNSLFFRKVPFGKTYCCDLKMLI

SEQ ID NO: 2121 - DNA, 1875 bp, Homo sapien
agctgcggcggccgcaggttccaaagcgggtccgagccgccgccgcgcgcgcgccgcgcactgcagccccaggccccggccccccacccacgtctgcgttgctgccccgcctgggccaggccccaaaggcaaggacaaagcagctgtcagggaacctccgccggagtcgaatttacgtgcagctgccggcaaccacaggttccaagatggtttgcgggggcttcgcgtgttccaagaactgcctgtgcgccctcaacctgctttacaccttggttagtctgctgctaattggaattgctgcgtggggcattggcttcgggctgatttccagtctccgagtggtcggcgtggtcattgcagtgggcatcttcttgttcctgattgctttagtgggtctgattggagctgtaaaacatcatcaggtgttgctatttttttatatgattattctgttacttgtatttattgttcagttttctgtatcttgcgcttgtttagccctgaaccaggagcaacagggtcagcttctggaggttggttggaacaatacggcaagtgctcgaaatgacatccagagaaatctaaactgctgtgggttccgaagtgttaacccaaatgacacctgtctggctagctgtgttaaaagtgaccactcgtgctcgccatgtgctccaatcataggagaatatgctggagaggttttgagatttgttggtggcattggcctgttcttcagttttacagagatcctgggtgtttggctgacctacagatacaggaaccagaaagacccccgcgcgaatcctagtgcattcctttgatgagaaaacaaggaagatttcctttcgtattatgatcttgttcactttctgtaattttctgttaagctccatttgccagtttaaggaaggaaacactatctggaaaagtaccttattgatagtggaattatatatttttactctatgtttctctacatgtttttttctttccgttgctgaaaaatatttgaaacttgtggtctctgaagctcggtggcacctggaatttactgtattcattgtcgggcactgtccactgtggcctttcttagcatttttacctgcagaaaaactttgtatggtaccactgtgttggttatatggtgaatctgaacgtacatctcactggtataattatatgtagcactgtgctgtgtagatagttcctactggaaaaagagtggaaatttattaaaatcagaaagtatgagatcctgttatgttaagggaaatccaaattcccaattttttttggtctttttaggaaagatgtgttgtggtaaaaagtgttagtataaaaatgataatttacttgtagtcttttatgattacaccaatgtattctagaaatagttatgtcttaggaaattgtggtttaatttttgacttttacaggtaagtgcaaaggagaagtggtttcatgaaatgttctaatgtataataacatttaccttcagcctccatcagaatggaacgagttttgagtaatcaggaagtatatctatatgatcttgatattgttttataataatttgaagtctaaaagactgcatttttaaacaagttagtattaatgcgttggcccacgtagcaaaaagatatttgattatcttaaaaattgttaaataccgttttcatgaaagttctcagtattgtaacagcaacttgtcaaacctaagcatatttgaatatgatctcccataatttgaaattgaaatcgtattgtgtggctctgtatattctgttaaaaaattaaaggacagaaacctttctttgtgtatgcatgtttgaattaaaagaaagtaatggaagaattgatcgatgaaaaaaaaaa

SEQ ID NO: 2122 - protein, 204 aa, Homo sapien
MVCGGFACSKNCLCALNLLYTLVSLLLIGIAAWGIGFGLISSLRVVGVVIAVGIFLFLIALVGLIGAVKHHQVLLFFYMIILLLVFIVQFSVSCACLALNQEQQGQLLEVGWNNTASARNDIQRNLNCCGFRSVNPNDTCLASCVKSDHSCSPCAPIIGEYAGEVLRFVGGIGLFFSFTEILGVWLTYRYRNQKDPRANPSAFL

SEQ ID NO: 2123 - DNA, 1496 bp, Homo sapien
ggcacgaggaaaatcaagataaaaatgttcacaattaagctccttctttttattgttcctctagttatttcctccagaattgatcaagacaattcatcatttgattctctatctccagagccaaaatcaagatttgctatgttagacgatgtaaaaattttagccaatggcctccttcagttgggacatggtcttaaagactttgtccataagacgaagggccaaattaatgacatatttcaaaaactcaacatatttgatcagtctttttatgatctatcgctgcaaaccagtgaaatcaaagaagaagaaaaggaactgagaagaactacatataaactacaagtcaaaaatgaagaggtaaagaatatgtcacttgaactcaactcaaaacttgaaagcctcctagaagaaaaaattctacttcaacaaaaagtgaaatatttagaagagcaactaactaacttaattcaaaatcaacctgaaactccagaacacccagaagtaacttcacttaaaacttttgtagaaaaacaagataatagcatcaaagaccttctccagaccgtggaagaccaatataaacaattaaaccaacagcatagtcaaataaaagaaatagaaaatcagctcagaaggactagtattcaagaacccacagaaatttctctatcttccaagccaagagcaccaagaactactccctttcttcagttgaatgaaataagaaatgtaaaacatgatggcattcctgctgaatgtaccaccatttataacagaggtgaacatacaagtggcatgtatgccatcagacccagcaactctcaagtttttcatgtctactgtgatgttatatcaggtagtccatggacattaattcaacatcgaatagatggatcacaaaacttcaatgaaacgtgggagaactacaaatatggttttgggaggcttgatggagaattttggttgggcctagagaagatatactccatagtgaagcaatctaattatgttttacgaattgagttggaagactggaaagacaacaaacattatattgaatattctttttacttgggaaatcacgaaaccaactatacgctacatctagttgcgattactggcaatgtccccaatgcaatcccggaaaacaaagatttggtgttttctacttgggatcacaaagcaaaaggacacttcaactgtccagagggttattcaggaggctggtggtggcatgatgagtgtggagaaaacaacctaaatggtaaatataacaaaccaagagcaaaatctaagccagagaggagaagaggattatcttggaagtctcaaaatggaaggttatactctataaaatcaaccaaaatgttgatccatccaacagattcagaaagctttgaatgaactgaggcaaatttaaaaggcaataatttaaacattaacctcattccaagttaatgtggtctaataatctggtattaaatccttaagag

SEQ ID NO: 2124 - protein, 460 aa, Homo sapien
MFTIKLLLFIVPLVISSRIDQDNSSFDSLSPEPKSRFAMLDDVKILANGLLQLGHGLKDFVHKTKGQINDIFQKLNIFDQSFYDLSLQTSEIKEEEKELRRTTYKLQVKNEEVKNMSLELNSKLESLLEEKILLQQKVKYLEEQLTNLIQNQPETPEHPEVTSLKTFVEKQDNSIKDLLQTVEDQYKQLNQQHSQIKEIENQLRRTSIQEPTEISLSSKPRAPRTTPFLQLNEIRNVKHDGIPAECTTIYNRGEHTSGMYAIRPSNSQVFHVYCDVISGSPWTLIQHRIDGSQNFNETWENYKYGFGRLDGEFWLGLEKIYSIVKQSNYVLRIELEDWKDNKHYIEYSFYLGNHETNYTLHLVAITGNVPNAIPENKDLVFSTWDHKAKGHFNCPEGYSGGWWWHDECGENNLNGKYNKPRAKSKPERRRGLSWKSQNGRLYSIKSTKMLIHPTDSESFE

SEQ ID NO: 2125 - DNA, 1181 bp, Homo sapien
tggtagtaagttctatagagcaaaaacaagtttaaagaaggaggttggggggagggggcgatggcgaagctccgggtggcttacgagtacacggaagccgaggacaagagcatccggctcggcttgtttctcatcatctccggcgtcgtgtcgctcttcatcttcggcttctgctggctgagtcccgcgctgcaggatctgcaagccacggaggccaattgcacggtgctgtcggtgcagcagatcggcgaggtgttcgagtgcaccttcacctgtggcgccgactgcaggggcacctcgcagtacccctgcgtccaggtctacgtgaacaactctgagtccaactctagggcgctgctgcacagcgacgagcaccagctcctgaccaaccccaagtgctcctatatccctccctgtaagagagaaaatcagaagaatttggaaagtgtcatgaattggcaacagtactggaaagatgagattggttcccagccatttacttgctattttaatcaacatcaaagaccagatgatgtgcttctgcatcgcactcatgatgagattgtcctcctgcattgcttcctctggcccctggtgacatttgtggtgggcgttctcattgtggtcctgaccatctgtgccaagagcttggcggtcaaggcggaagccatgaagaagcgcaagttctcttaaaggggaaggaggcttgtagaaagcaaagtacagaagctgtactcatcggcacgcgtccacctgcggaacctgtgtttcctggcgcaggagatggacagggccacgacagggctctgagaggctcatccctcagtggcaacagaaacaggcacaactggaagacttggaacctcaaagcttgtattccatctgctgtagcaatggctaaagggtcaagatcttagctgtatggagtaactatttcagaaaaccctataagaagttcattttctttcaaaagtaacagtatattatttgtacagtgtagtatacaaaccattatgatttatgctacttaaaaatattaaaatagagtggtctgtgttattttctatttccttttttatgcttagaacaccagggtttaaaaaaaaaaaaaaggtgaggacatctgggtctcatttgcttctgctaggttaaacttttacttgacaacaaggattcctgct

SEQ ID NO: 2126 - protein, 210 aa, Homo sapien
MAKLRVAYEYTEAEDKSIRLGLFLIISGVVSLFIFGFCWLSPALQDLQATEANCTVLSVQQIGEVFECTFTCGADCRGTSQYPCVQVYVNNSESNSRALLHSDEHQLLTNPKCSYIPPCKRENQKNLESVMNWQQYWKDEIGSQPFTCYFNQHQRPDDVLLHRTHDEIVLLHCFLWPLVTFVVGVLIVVLTICAKSLAVKAEAMKKRKFS

SEQ ID NO: 2127 - DNA, 1587 bp, Homo sapien
actgtctgcacagacagcaccatgtcgctcatggtcgtcagcatggcgtgtgttgggttcttcttgctgcagggggcctggccacatgagggagtccacagaaaaccttccctccgggcccacccaggtcccctggtgaaatcagaagagacagtcatcctgcaatgttggtcagatgtcaggtttgagcacttccttctgcacagagaagggaagtttaaggacactttgcgcctcattggagagcaccatgatggggtctccaaggccaacttctccatcggtcccatgatgcaagaccttgcagggacctacagatgctacggttctgttactcactccccctatcagttgtcagctcccagtgaccctctggacatcgtcatcacaggtctatatgagaaaccttctctctcagcccagccgggccccacggttctggcaggagagagcgtgaccttgtcctgcagctcccggagctcctatgacatgtaccatctatccagggagggggaggcccatgaacgtaggttctctgcagggcccaaggtcaacggaacattccaggccgactttcctctgggccctgccacccacggaggaacctacagatgcttcggctctttccgtgactctccatacgagtggtcaaactcgagtgacccactgcttgtttctgtcacaggaaacccttcaaatagttggccttcacccactgaaccaagctccgaaaccggtaaccccatacacctgcatgttctgattgggacctcagtggtcatcatcctcttcatcctcctcctcttctttctccttcatcgctggtgctgcaacaaaaaaaatgctgttgtaatggaccaagagcctgcagggaacagaacagtgaacagggaggactctgatgaacaagaccctcaggaggtgacatatgcacagttgaatcactgcgttttcacacagagaaaaatcactcacccttctcagaggcccaagacacccccaacagatatcatcgtgtacacggaacttccaaatgctgagccctgatccaaagttgtctcctgcccatgagcaccacagtcaggccttgaggggatcttctagggagacaacagccctgtctcaaaactgggttgccagctccaatgtaccagcagctggaatctgaaggcgtgagtctgcatcttagggcatcgctcttcctcacaccacaaatctgaacgtgcctctctcttgcttacaaatgtctaaggtccccactgcctgctggagagaaaacacactcctttgcttagcccacaattctccatttcacttgacccctgcccacctctccaacctaactggcttacttcctagtctacttgaggctgcaatcacactgaggaactcacaattccaaacatacaagaggctccctcttaacacggcacttagacacgtgctgttccaccttccctcatgctgttccacctcccctcagactagctttcagccttctgtcagcagtaaaacttatatattttttaaaataatttcaatgtagttttccctccttcaaataaacatgtctgccctcaaaaaaaa

SEQ ID NO: 2128 - protein, 341 aa, Homo sapien
MSLMVVSMACVGFFLLQGAWPHEGVHRKPSLRAHPGPLVKSEETVILQCWSDVRFEHFLLHREGKFKDTLRLIGEHHDGVSKANFSIGPMMQDLAGTYRCYGSVTHSPYQLSAPSDPLDIVITGLYEKPSLSAQPGPTVLAGESVTLSCSSRSSYDMYHLSREGEAHERRFSAGPKVNGTFQADFPLGPATHGGTYRCFGSFRDSPYEWSNSSDPLLVSVTGNPSNSWPSPTEPSSETGNPIHLHVLIGTSVVIILFILLLFFLLHRWCCNKKNAVVMDQEPAGNRTVNREDSDEQDPQEVTYAQLNHCVFTQRKITHPSQRPKTPPTDIIVYTELPNAEP

SEQ ID NO: 2129 - DNA, 470 bp, Homo sapien
gggaccgctataaggccagtcggactgcgacatagcccatcccctcgaccgctcgcgtcgcatttggccgcctccctaccgctccaagcccagccctcagccatggcatgccccctggatcaggccattggcctcctcgtggccatcttccacaagtactccggcagggagggtgacaagcacaccctgagcaagaaggagctgaaggagctgatccagaaggagctcaccattggctcgaagctgcaggatgctgaaattgcaaggctgatggaagacttggaccggaacaaggaccaggaggtgaacttccaggagtatgtcaccttcctgggggccttggctttgatctacaatgaagccctcaagggctgaaaataaatagggaagatggagacacctctgggggtcctctctgagtcaaatccagtggtgggtaattgtacaataaattttttttggtcaaattt

SEQ ID NO: 2130 - protein, 90 aa, Homo sapien
MACPLDQAIGLLVAIFHKYSGREGDKHTLSKKELKELIQKELTIGSKLQDAEIARLMEDLDRNKDQEVNFQEYVTFLGALALIYNEALKG

SEQ ID NO: 2131 - DNA, 7604 bp, Homo sapien
gagcagattcctactgttcttaaaggacagtaatgccttttgagtctggtctgaagaacataacaggtctgtgatcagaagtaggttgcatctctctcaactttaatttccttagctatacctgtagggatgacttaagcctaggggagctcctatatttgggaagcttgtgcacagggaagccttaaatgatggtgcctgcagattggatctagtagaaattaggtccttgggcatggatgcttggggaacctctcagtgacctcaggtgaacttgttgctcgtagagccaagaggcgaagttaattcaggccttccttttgaccactgccccctcttcctaggccttggcccctccaccagaggaaggtgctgccacgtgtctgctccttctgaacctccaggtttctgctacgttgccccatggaggacacacccccctcactcagctgctccgactgtcagcgccactttcccagcctcccagagctctctcggcaccgagaactgctccatccatctcccaaccaggacagtgaggaggctgacagcatccctcggccctaccgttgtcagcagtgtgggcggggctaccgtcaccccgggagcctggttaaccatcgtcggacccacgagactggccttttcccctgtaccacctgtggcaaggacttctccaatcccatggctctcaagagccatatgaggacacatgctcctgagggccgccgcaggcacaggcccccacgccccaaggaagccactccacacctccagggtgagacggtgtccactgactcctggggccaaaggcttggctctagtgaaggctgggaaaaccagacaaaacatacagaagagacacctgactgtgaatctgtacctgaccccagggcagcttcgggtacgtgggaagatctgcccaccagacaaagagaaggcttggcaagccacccaggtcctgaggatggtgcagacggctggggaccctccactaactctgccagagcccctcctctccccatcccagccagcagccttcttagcaacttggaacagtatctggctgaatcagtagtgaacttcacagggggccaggagcccacccagtcccctcctgctgaggaggagcggcggtacaaatgtagtcagtgtggcaagacctacaagcacgccgggagcctcaccaaccaccgccagagccacacgctgggcatctacccctgtgccatctgtttcaaggagttctctaacctcatggctctgaagaaccactctcgactgcatgcccagtatcggccttaccactgtccccactgcccccgtgtcttccggctcccccgggagctgctggaacaccagcagtcccatgagggtgaaaggcaggagccacgctgggaggagaaagggatgcccaccaccaatgggcacacagatgagagcagccaggaccagctccccagtgcacagatgctgaatggctctgcggagctcagcacctctggggagctggaggacagtggcctggaggaataccggcctttccgctgtggggactgtggccgtacttaccgccatgctgggagcctcatcaaccatcgaaagagccaccagacaggtgtctacccctgctcactctgttctaagcagctgttcaatgcggctgccctcaaaaaccatgtgcgggctcatcacaggcccaggcaaggagttggggaaaatgggcagccatcagtcccaccagctcccctgctgctggctgagaccacccacaaagaggaagaggaccccaccaccaccctggaccatcggccctataagtgcagtgagtgtggtcgtgcttaccgccaccgggggagcctggtgaaccatcgccacagccatcggactggagagtaccagtgctcactctgtccccgcaagtaccccaatctcatggccctgcgcaaccacgtgcgggtacattgcaaggctgctcgccgaagtgcagacatcggggctgagggtgcccccagccacctcaaggtagaactcccgcctgacccagtggaggcagaggcagccccgcacacagatcaggaccatgtgtgcaaacatgaagaagaggccacggacatcaccccagcagcagacaagacagcagcacatatctgtagcatctgtgggctgctctttgaagacgctgagagccttgaacgtcatggcctgactcatggggcaggggaaaaggaaaatagcagaacagagaccacaatgtcacctcctagggcctttgcctgccgagactgtggaaagagctatcgccactcaggcagccttatcaaccacaggcagacccaccagacaggagacttcagttgtggggcctgtgccaagcacttccacaccatggctgccatgaagaaccacttgcgccggcacagtcggcggcggagcaggcggcatcggaagcgggctggcggtgccagcggtgggagagaagccaaactcctggcagcggagagctggacccgggagctagaagacaatgaaggcctggagtctccccaagacccttcaggggaaagtcctcatggggctgaaggcaacctggaaagtgatggggactgtttgcaggctgaatctgaaggggacaaatgtgggcttgagagggatgagacccatttccagggtgataaagagagcggaggcactggggaaggactggaaaggaaggatgccagtttacttgacaacttggacatcccaggtgaggaaggtggtggcactcacttctgcgatagcctcactggggtggatgaagaccagaagccagccactggccaacccaactcctcttcccactctgccaatgctgtcactggctggcaggctggggccgctcacacatgctctgactgtgggcattctttcccccatgccactggcctgctgagccacaggccctgccacccaccaggcatctatcagtgctccctctgcccgaaggagtttgactctctgcctgccctccgcagccacttccagaaccataggcctggggaggcgacctcagcacagcctttcctctgctgcctctgtggcatgatcttccctgggcgggctggctacaggcttcaccggcgccaggcccacagctcctctggcatgactgagggctcagaggaggagggggaagaggaaggagtggcagaggcagcccctgcacgcagtccaccactgcagctctcggaagcagagctgctgaatcagctgcagcgggaggtggaagcgctggacagtgcagggtatgggcacatctgtggctgctgtggtcagacctacgatgacctggggagcctggagcgtcaccaccaaagtcagagttctgggactactgcagacaaggctcccagccccttgggagtggcaggtgatgccatggagatggtcgtggacagtgtcttggaggacatagtgaattctgtctctggagagggtggagatgccaagtctcaagagggagcaggcacccccttgggagacagcctctgcatccagggtggggaaagtttgttggaggctcagccccgccccttccgctgcaaccagtgtggcaagacctatcgccatgggggcagcctggtgaaccaccgcaagatccaccagactggagactttctctgccctgtctgctcccgctgctaccccaacctggctgcctaccgtaatcatctgcggaaccaccctcgctgcaaaggctctgagccccaggttgggcccatcccagaggcagcaggtagcagtgagctgcaggttgggcccatcccagaaggaggcagcaacaagccccagcacatggcagaggaggggccggggcaagcagaagtcgagaagctccaggaagaacttaaagtggagcccctggaggaagtggccagggtgaaagaagaggtgtgggaggagaccactgtgaagggggaggagatagagcccaggctggagactgccgagaagggctgccagactgaagccagctctgagcggcccttcagctgcgaggtgtgtggccgatcctacaagcacgccggcagcctcatcaaccaccggcagagccaccagaccggccactttggctgtcaggcctgctccaagggcttctcaaacctcatgtccctcaagaaccaccggcgcatccatgcagatccccgacgtttccgctgcagcgagtgtgggaaggccttccgcctgcggaaacagctggccagccaccagcgggtccacatggaacggcgtgggggtgggggcacccgaaaggcgactcgggaagatcggcccttccgctgtgggcagtgcgggcggacctatcgccacgccggcagcctcctgaaccaccggcgcagccacgagacgggccagtacagctgccccacctgccccaagacctactccaaccgcatggccctgaaggaccaccagaggctgcactcagagaatcggcggcgacgggctggacggtccaggcgcacagctgtgcgttgcgccctctgtggccgcagcttccctggccggggatctttggagcggcacctgcgggagcatgaggagacagaaagggagccagccaatggccagggaggcctggatggcacagcggccagtgaggcgaacctgactggcagccagggactagagacccaattgggtggtgctgagccagtaccccacttggaggatggagtcccaaggccaggggagcgcagtcagagccccatcagggcagcaagctcagaagccccagagccactgtcctggggtgcagggaaggcaggtgggtggccggtaggtgggggactggggaatcatagtggaggctgggttcctcagttcctaactaggtcagaggagccagaggacagtgtccacaggagtccttgccacgctggtgactgccagctcaatggacctactctgagtcacatggatagctgggacaacagagacaacagctctcagctgcagccagggagccactcctcttgcagccagtgtggcaagacttactgccagtcaggcagcctcttgaaccacaacaccaacaagacagaccgacactattgcctgctctgctccaaggagttcttaaatcctgtggccacaaagagccacagccacaaccacatagacgcccagacctttgcctgtcctgactgtggcaaagcctttgagtcccaccaggaactggccagccacctgcaggctcatgcccggggccacagccaggtgccagcccagatggaggaggccagagatcccaaagccgggactggggaggaccaggtggttctccctggtcaagggaaagcccaggaggccccatcagaaacccccagaggcccaggagagagtgtggagagagccaggggaggacaagcggtgacgtccatggcggctgaggacaaggagcggcccttccgctgcacccagtgcgggcgctcctaccgccatgctggcagcctgctgaaccaccagaaggcccacaccacagggttgtacccgtgctccctctgtcccaaacttctccctaacctgctgtctcttaagaaccacagcaggacccacacggaccccaagcgccactgctgcagcatctgtggcaaggcctttcggacagctgcccggctggagggccacgggcgggtccatgcaccccgggaggggcctttcacctgcccccattgtccccgccacttccgccgccgaatcagcttcgtgcagcaccagcagcagcaccaggaggagtggacggtggccggctccggtagggggcatgaagggtcccaggaggaggtgggcacacagtggagggggaagtccagccccaaagtcggtgggggagcaaggagtgagaggagagagccccggggattctaagaggtgggtgggggcttggctatggggtgagagaagtagcttgaggatgtgctgagctgagcacccgcaagtcaggtataacaaatagcagggtgggttgggcagcacgtgggggcgtggtcaggccgaggctgctacctgggctcctccattacactgtagccagaatggaatggtctttctgttcaggggaaggtcactgggtaccccctggctgctgtgtctggaaaccctcctgagtcagccagtaaagtaatgacttccagagaaaaagaggaagccattggtttggtctaggttccattctttcctggagcaggccgggtgccagggaacaagggatggggcatgggctccacggcttccctgctgacttggccacggaaactggttcactggttggcaccctactccctgtccctctttccctgcgccttgtctctgctgctcctctccttggaaactagacctctggtccttccctgtcagtgttgctcccatctcttctctaacctttattcagccccttttccctctgctgccaacggcctttttaggatccaaccaaaccaccctttctacctgcgcaccctgccaccctctgcacacctttaactggaggactgagtcacagataattgtttccttgaagtccaggcccagctgcagcaacaacagtcattagcccgtgtcacatccctgatcagagggcatctccgtggggaatcgcctccacccagcactgctggaagccgcggctgccagggagtggggcggccggttccctcagcaggacctgggctggcctctccacctcccctagtagaggcggacccattccatctagtggccaccgagggtgggtggccctgagatggtgggcccttgacaggccttgtcagagcagagggcaggtgggagtcacctgaaagctgaaggaatggctttaaggatagaagatttctcatgacctcaagggatatgagggaggagccagtttgccagggctgggaaaataattaggaggcctagaatccctgttctcatctgggcctccggggccaggggcaggggaatggcctgcagggctgggagggggtacacgctgtgcggggtctgcccctcagttggtgacctcctctctctctccccccaggagccccagtggcaccagtgacgggcagaggggacttgccattgccccctccacccacccccacgaccccactcctggatccttcaccccagtggcctgcagacctcagcttctccctctgaacttcaagtctccaaagatcagaatctgggggagggagcgcgtgcagggaggggcttgatctccacattttctcaggagtagttcgggcatccccatatcttctcctctccccttgtgaagaggacccagatctggcttctttcccaaggagggggtggggtgttcctcgcgtccctgtccttgaaggacctccttcccccagcctcatcaccgtgctcttctcagcgccaccctcagcagccagattgcaacaccagggagaggtggatgcagagccccaccggtgggaaagttgcctgtggaagggagccttttgctacaatttgtaacttattttctaaagtctattttgtaacaatttatttaagtttaaaaaaaggaaaactgctgccccccaaaaaaagaaattttc

SEQ ID NO: 2132 - protein, 1829 aa, Homo sapien
MEDTPPSLSCSDCQRHFPSLPELSRHRELLHPSPNQDSEEADSIPRPYRCQQCGRGYRHPGSLVNHRRTHETGLFPCTTCGKDFSNPMALKSHMRTHAPEGRRRHRPPRPKEATPHLQGETVSTDSWGQRLGSSEGWENQTKHTEETPDCESVPDPRAASGTWEDLPTRQREGLASHPGPEDGADGWGPSTNSARAPPLPIPASSLLSNLEQYLAESVVNFTGGQEPTQSPPAEEERRYKCSQCGKTYKHAGSLTNHRQSHTLGIYPCAICFKEFSNLMALKNHSRLHAQYRPYHCPHCPRVFRLPRELLEHQQSHEGERQEPRWEEKGMPTTNGHTDESSQDQLPSAQMLNGSAELSTSGELEDSGLEEYRPFRCGDCGRTYRHAGSLINHRKSHQTGVYPCSLCSKQLFNAAALKNHVRAHHRPRQGVGENGQPSVPPAPLLLAETTHKEEEDPTTTLDHRPYKCSECGRAYRHRGSLVNHRHSHRTGEYQCSLCPRKYPNLMALRNHVRVHCKAARRSADIGAEGAPSHLKVELPPDPVEAEAAPHTDQDHVCKHEEEATDITPAADKTAAHICSICGLLFEDAESLERHGLTHGAGEKENSRTETTMSPPRAFACRDCGKSYRHSGSLINHRQTHQTGDFSCGACAKHFHTMAAMKNHLRRHSRRRSRRHRKRAGGASGGREAKLLAAESWTRELEDNEGLESPQDPSGESPHGAEGNLESDGDCLQAESEGDKCGLERDETHFQGDKESGGTGEGLERKDASLLDNLDIPGEEGGGTHFCDSLTGVDEDQKPATGQPNSSSHSANAVTGWQAGAAHTCSDCGHSFPHATGLLSHRPCHPPGIYQCSLCPKEFDSLPALRSHFQNHRPGEATSAQPFLCCLCGMIFPGRAGYRLHRRQAHSSSGMTEGSEEEGEEEGVAEAAPARSPPLQLSEAELLNQLQREVEALDSAGYGHICGCCGQTYDDLGSLERHHQSQSSGTTADKAPSPLGVAGDAMEMVVDSVLEDIVNSVSGEGGDAKSQEGAGTPLGDSLCIQGGESLLEAQPRPFRCNQCGKTYRHGGSLVNHRKIHQTGDFLCPVCSRCYPNLAAYRNHLRNHPRCKGSEPQVGPIPEAAGSSELQVGPIPEGGSNKPQHMAEEGPGQAEVEKLQEELKVEPLEEVARVKEEVWEETTVKGEEIEPRLETAEKGCQTEASSERPFSCEVCGRSYKHAGSLINHRQSHQTGHFGCQACSKGFSNLMSLKNHRRIHADPRRFRCSECGKAFRLRKQLASHQRVHMERRGGGGTRKATREDRPFRCGQCGRTYRHAGSLLNHRRSHETGQYSCPTCPKTYSNRMALKDHQRLHSENRRRRAGRSRRTAVRCALCGRSFPGRGSLERHLREHEETEREPANGQGGLDGTAASEANLTGSQGLETQLGGAEPVPHLEDGVPRPGERSQSPIRAASSEAPEPLSWGAGKAGGWPVGGGLGNHSGGWVPQFLTRSEEPEDSVHRSPCHAGDCQLNGPTLSHMDSWDNRDNSSQLQPGSHSSCSQCGKTYCQSGSLLNHNTNKTDRHYCLLCSKEFLNPVATKSHSHNHIDAQTFACPDCGKAFESHQELASHLQAHARGHSQVPAQMEEARDPKAGTGEDQVVLPGQGKAQEAPSETPRGPGESVERARGGQAVTSMAAEDKERPFRCTQCGRSYRHAGSLLNHQKAHTTGLYPCSLCPKLLPNLLSLKNHSRTHTDPKRHCCSICGKAFRTAARLEGHGRVHAPREGPFTCPHCPRHFRRRISFVQHQQQHQEEWTVAGSGRGHEGSQEEVGTQWRGKSSPKVGGGARSERREPRGF

SEQ ID NO: 2133 - DNA, 6368 bp, Homo sapien
ccatggacctgcgccctgagctgcccaccaccctgggccccgtcagcctgcgccagctggggctggagcacacccgctacccctgtctggaccttggtgccatgttgctctacaccctgaccttctggctcctgctgcgccagtttgtgaaagagaagctgctgaagtgggcagagtctccagctgcgctgacggaggtcaccgtggcagacacagagcctacgcggacgcagacgctgttgcagagcctgggggagctggtgaagggcgtgtacgccaagtactggatctatgtgtgtgctggcatgttcatcgtggtcagcttcgccggccgcctcgtggtctacaagattgtctacatgttcctcttcctgctctgcctcaccctcttccaggtctactacagcctgtggcggaagctgctcaaggccttctggtggctcgtggtggcctacaccatgctggtcctcatcgccgtctacaccttccagttccaggacttccctgcctactggcgcaacctcactggcttcaccgacgagcagctgggggacctgggcctggagcagttcagcgtatccgagctcttctccagcatcctggtgcccggcttcttcctcctggcctgcatcctgcagctgcactacttccacaggcccttcatgcagctcaccgacatggagcacgtgtccctgcctggcacgcgcctcccgcgctgggctcacaggcaggatgcagtgagtgggaccccactgctgcgggaggagcagcaggagcatcagcagcagcagcaggaggaggaggaggaggaggactccagggacgaggggctgggcgtggccactccccaccaggccacgcaggtgcctgaaggggcagccaagtggggcctggtggctgagcgcctgctggagctggcagccggcttctcggacgtcctctcacgcgtgcaggtgttcctgcggcggctgctggagcttcacgttttcaagctggtggccctgtacaccgtctgggtggccctgaaggaggtgtcggtgatgaacctgctgctggtggtgctgtgggccttcgccctgccctacccacgcttccggcccatggcctcctgcctgtccaccgtgtggacctgcgtcatcatcgtgtgtaagatgctgtaccagctcaaggttgtcaacccccaggagtattccagcaactgcaccgagcccttccccaacagcaccaacttgctgcccacggagatcagccagtccctgctgtaccgggggcccgtggaccctgccaactggtttggggtgcggaaagggttccccaacctgggctacatccagaaccacctgcaagtgctgctgctgctggtattcgaggccatcgtgtaccggcgccaggagcactaccgccggcagcaccagctggccccgctgcctgcccaggccgtgtttgccagcggcacccgccagcagctggaccaggatctgctcggctgcctcaagtacttcatcaacttcttcttctacaaattcgggctggagatctgcttcctgatggccgtgaacgtgatcgggcagcgcatgaactttctggtgaccctgcacggttgctggctggtggccatcctcacccgcaggcaccgccaggccattgcccgcctctggcccaactactgcctcttcctggcgctgttcctgctgtaccagtacctgctgtgcctggggatgcccccggccctgtgcattgattatccctggcgctggagccgggccgtccccatgaactccgcactcatcaagtggctgtacctgcctgatttcttccgggcccccaactccaccaacctcatcagcgactttctcctgctgctgtgcgcctcccagcagtggcaggtgttctcagctgagcgcacagaggagtggcagcgcatggctggcgtcaacaccgaccgcctggagccgctgcggggggagcccaaccccgtgcccaactttatccactgcaggtcctaccttgacatgctgaaggtggccgtcttccgatacctgttctggctggtgctggtggtggtgtttgtcacgggggccacccgcatcagcatcttcgggctgggctacctgctggcctgcttctacctgctgctcttcggcacggccctgctgcagagggacacacgggcccgcctcgtgctgtgggactgcctcattctgtacaacgtcaccgtcatcatctccaagaacatgctgtcgctcctggcctgcgtcttcgtggagcagatgcagaccggcttctgctgggtcatccagctcttcagccttgtatgcaccgtcaagggctactatgaccccaaggagatgatggacagagaccaggactgcctgctgcctgtggaggaggctggcatcatctgggacagcgtctgcttcttcttcctgctgctgcagcgccgcgtcttccttagccattactacctgcacgtcagggccgacctccaggccaccgccctgctagcctccaggggcttcgccctctacaacgctgccaacctcaagagcattgacttccaccgcaggatagaggagaagtccctggcccagctgaaaagacagatggagcgtatccgtgccaagcaggagaagcacaggcagggccgggtggaccgcagtcgcccccaggacaccctgggccccaaggaccccggcctggagccagggcccgacagtccagggggctcctccccgccacggaggcagtggtggcggccctggctggaccacgccacagtcatccactccggggactacttcctgtttgagtccgacagtgaggaagaggaggaggctgttcctgaagacccgaggccgtcggcacagagtgccttccagctggcgtaccaggcatgggtgaccaacgcccaggcggtgctgaggcggcggcagcaggagcaggagcaggcaaggcaggaacaggcaggacagctacccacaggaggtggtcccagccaggaggtggagccagcagagggccccgaggaggcagcggcaggccggagccatgtggtgcagagggtgctgagcacggcgcagttcctgtggatgctggggcaggcgctagtggatgagctgacacgctggctgcaggagttcacccggcaccacggcaccatgagcgacgtgctgcgggcagagcgctacctcctcacacaggagctcctgcagggcggcgaagtgcacaggggcgtgctggatcagctgtacacaagccaggccgaggccacgctgccaggccccaccgaggcccccaatgccccaagcaccgtgtccagtgggctgggcgcggaggagccactcagcagcatgacagacgacatgggcagccccctgagcaccggctaccacacgcgcagtggcagtgaggaggcagtcaccgaccccggggagcgtgaggctggtgcctctctgtaccagggactgatgcggacggccagcgagctgctcctggacaggcgcctgcgcatcccagagctggaggaggcagagctgtttgcggaggggcagggccgggcgctgcggctgctgcgggccgtgtaccagtgtgtggccgcccactcggagctgctctgctacttcatcatcatcctcaaccacatggtcacggcctccgccggctccctggtgctgcccgtgctcgtcttcctgtgggccatgctgtcgatcccgaggcccagcaagcgcttctggatgacggccatcgtcttcaccgagatcgcggtggtcgtcaagtacctgttccagtttgggttcttcccctggaacagccacgtggtgctgcggcgctacgagaacaagccctacttcccgccccgcatcctgggcctggagaagactgacggctacatcaagtacgacctggtgcagctcatggcccttttcttccaccgctcccagctgctgtgctatggcctctgggaccatgaggaggactcaccatccaaggagcatgacaagagcggcgaggaggagcagggagccgaggaggggccaggggtgcctgcggccaccaccgaagaccacattcaggtggaagcgagggtcggacccacggacgggaccccagaaccccaagtggagctcaggccccgtgatacgaggcgcatcagtctacgttttagaagaaggaagaaggagggcccagcacggaaaggagcggcagccatcgaagctgaggacagggaggaagaagagggggaggaagagaaagaggcccccacggggagagagaagaggccaagccgctctggaggaagagtaagggcggccgggcggcggctgcagggcttctgcctgtccctggcccagggcacatatcggccgctacggcgcttcttccacgacatcctgcacaccaagtaccgcgcagccaccgacgtctatgccctcatgttcctggctgatgttgtcgacttcatcatcatcatttttggcttctgggcctttgggaagcactcggcggccacagacatcacgtcctccctatcagacgaccaggtacccgaggctttcctggtcatgctgctgatccagttcagtaccatggtggttgaccgcgccctctacctgcgcaagaccgtgctgggcaagctggccttccaggtggcgctggtgctggccatccacctatggatgttcttcatcctgcccgccgtcactgagaggatgttcaaccagaatgtggtggcccagctctggtacttcgtgaagtgcatctacttcgccctgtccgcctaccagatccgctgcggctaccccacccgcatcctcggcaacttcctcaccaagaagtacaatcatctcaacctcttcctcttccaggggttccggctggtgccgttcctggtggagctgcgggcagtgatggactgggtgtggacggacaccacgctgtccctgtccagctggatgtgtgtggaggacatctatgccaacatcttcatcatcaaatgcagccgagagacagagaagaaatacccgcagcccaaagggcagaagaagaagaagatcgtcaagtacggcatgggtggcctcatcatcctcttcctcatcgccatcatctggttcccgctgctcttcatgtcgctggtgcgctccgtggttggggttgtcaaccagcccatcgatgtcaccgtcaccctcaagctgggcggctatgagccgctgttcaccatgagcgcccagcagccgtccatcatccccttcacggcccaggcctatgaggagctgtcccggcagtttgacccccagccgctggccatgcagttcatcagccagtacagccctgaggacatcgtcacggcgcagattgagggcagctccggggcgctgtggcgcatcagtccccccagccgtgcccagatgaagcgggagctctacaacggcacggccgacatcaccctgcgcttcacctggaacttccagagggacctggcgaagggaggcactgtggagtatgccaacgagaagcacatgctggccctggcccccaacagcactgcacggcggcagctggccagcctgctcgagggcacctcggaccagtctgtggtcatccccaatctcttccccaagtacatccgtgcccccaacgggcccgaagccaaccctgtgaagcagctgcagcccaatgaggaggccgactacctcggcgtgcgtatccagctgcggagggagcagggtgcgggggccaccggcttcctcgaatggtgggtcatcgagctgcaggagtgccggaccgactgcaacctgctgcccatggtcattttcagtgacaaggtcagcccaccgagcctcggcttcctggctggctacggcatcatggggctgtacgtgtccatcgtgctggtcatcggcaagttcgtgcgcggattcttcagcgagatctcgcactccattatgttcgaggagctgccgtgcgtggaccgcatcctcaagctctgccaggacatcttcctggtgcgggagactcgggagctggagctggaggaggagttgtacgccaagctcatcttcctctaccgctcaccggagaccatgatcaagtggactcgtgagaaggagtaggagctgctgctggcgcccgagagggaaggagccggcctgctgggcagcgtggccacaaggggcggcactcctcaggccgggggagccactgccccgtccaaggccgccagctgtgatgcatcctcccggcctgcctgagccctgatgctgctgtcagagaaggacactgcgtccccacggcctgcgtggcgctgccgtcccccacgtgtactgtagagttttttttttaattaaaaaatgttttatttatacaaatgg

SEQ ID NO: 2134 - protein, 2000 aa, Homo sapien
MDLRPELPTTLGPVSLRQLGLEHTRYPCLDLGAMLLYTLTFWLLLRQFVKEKLLKWAESPAALTEVTVADTEPTRTQTLLQSLGELVKGVYAKYWIYVCAGMFIVVSFAGRLVVYKIVYMFLFLLCLTLFQVYYSLWRKLLKAFWWLVVAYTMLVLIAVYTFQFQDFPAYWRNLTGFTDEQLGDLGLEQFSVSELFSSILVPGFFLLACILQLHYFHRPFMQLTDMEHVSLPGTRLPRWAHRQDAVSGTPLLREEQQEHQQQQQEEEEEEDSRDEGLGVATPHQATQVPEGAAKWGLVAERLLELAAGFSDVLSRVQVFLRRLLELHVFKLVALYTVWVALKEVSVMNLLLVVLWAFALPYPRFRPMASCLSTVWTCVIIVCKMLYQLKVVNPQEYSSNCTEPFPNSTNLLPTEISQSLLYRGPVDPANWFGVRKGFPNLGYIQNHLQVLLLLVFEAIVYRRQEHYRRQHQLAPLPAQAVFASGTRQQLDQDLLGCLKYFINFFFYKFGLEICFLMAVNVIGQRMNFLVTLHGCWLVAILTRRHRQAIARLWPNYCLFLALFLLYQYLLCLGMPPALCIDYPWRWSRAVPMNSALIKWLYLPDFFRAPNSTNLISDFLLLLCASQQWQVFSAERTEEWQRMAGVNTDRLEPLRGEPNPVPNFIHCRSYLDMLKVAVFRYLFWLVLVVVFVTGATRISIFGLGYLLACFYLLLFGTALLQRDTRARLVLWDCLILYNVTVIISKNMLSLLACVFVEQMQTGFCWVIQLFSLVCTVKGYYDPKEMMDRDQDCLLPVEEAGIIWDSVCFFFLLLQRRVFLSHYYLHVRADLQATALLASRGFALYNAANLKSIDFHRRIEEKSLAQLKRQMERIRAKQEKHRQGRVDRSRPQDTLGPKDPGLEPGPDSPGGSSPPRRQWWRPWLDHATVIHSGDYFLFESDSEEEEEAVPEDPRPSAQSAFQLAYQAWVTNAQAVLRRRQQEQEQARQEQAGQLPTGGGPSQEVEPAEGPEEAAAGRSHVVQRVLSTAQFLWMLGQALVDELTRWLQEFTRHHGTMSDVLRAERYLLTQELLQGGEVHRGVLDQLYTSQAEATLPGPTEAPNAPSTVSSGLGAEEPLSSMTDDMGSPLSTGYHTRSGSEEAVTDPGEREAGASLYQGLMRTASELLLDRRLRIPELEEAELFAEGQGRALRLLRAVYQCVAAHSELLCYFIIILNHMVTASAGSLVLPVLVFLWAMLSIPRPSKRFWMTAIVFTEIAVVVKYLFQFGFFPWNSHVVLRRYENKPYFPPRILGLEKTDGYIKYDLVQLMALFFHRSQLLCYGLWDHEEDSPSKEHDKSGEEEQGAEEGPGVPAATTEDHIQVEARVGPTDGTPEPQVELRPRDTRRISLRFRRRKKEGPARKGAAAIEAEDREEEEGEEEKEAPTGREKRPSRSGGRVRAAGRRLQGFCLSLAQGTYRPLRRFFHDILHTKYRAATDVYALMFLADVVDFIIIIFGFWAFGKHSAATDITSSLSDDQVPEAFLVMLLIQFSTMVVDRALYLRKTVLGKLAFQVALVLAIHLWMFFILPAVTERMFNQNVVAQLWYFVKCIYFALSAYQIRCGYPTRILGNFLTKKYNHLNLFLFQGFRLVPFLVELRAVMDWVWTDTTLSLSSWMCVEDIYANIFIIKCSRETEKKYPQPKGQKKKKIVKYGMGGLIILFLIAIIWFPLLFMSLVRSVVGVVNQPIDVTVTLKLGGYEPLFTMSAQQPSIIPFTAQAYEELSRQFDPQPLAMQFISQYSPEDIVTAQIEGSSGALWRISPPSRAQMKRELYNGTADITLRFTWNFQRDLAKGGTVEYANEKHMLALAPNSTARRQLASLLEGTSDQSVVIPNLFPKYIRAPNGPEANPVKQLQPNEEADYLGVRIQLRREQGAGATGFLEWWVIELQECRTDCNLLPMVIFSDKVSPPSLGFLAGYGIMGLYVSIVLVIGKFVRGFFSEISHSIMFEELPCVDRILKLCQDIFL

SEQ ID NO: 2135 - DNA, 4565 bp, Homo sapien
ggcgagctaagccggaggatgtgcagctgcggcggcggcgccggctacgaagaggacggggacaggcgccgtgcgaaccgagcccagccagccggaggacgcgggcagggcgggacgggagcccggactcgtctgccgccgccgtcgtcgccgtcgtgccggccccgcgtccccgcgcgcgagcgggaggagccgccgccacctcgcgcccgagccgccgctagcgcgcgccgggcatggtcccctcttaaaggcgcaggccgcggcggcgggggcgggcgtgcggaacaaagcgccggcgcggggcctgcgggcggctcgggggccgcgatgggcgcggcgggcccgcggcggcggcggcgctgcccgggccgggcctcgcggcgctagggcgggctggcctccgcgggcgggggcagcgggctgagggcgcgcggggcctgcggcggcggcggcggcggcggcggcggcccggcgggcggagcggcgcgggcatggccgcgcgcggccggcgcgcctggctcagcgtgctgctcgggctcgtcctgggcttcgtgctggcctcgcggctcgtcctgccccgggcttccgagctgaagcgagcgggcccacggcgccgcgccagccccgagggctgccggtccgggcaggcggcggcttcccaggccggcggggcgcgcggcgatgcgcgcggggcgcagctctggccgcccggctcggacccagatggcggcccgcgcgacaggaactttctcttcgtgggagtcatgaccgcccagaaatacctgcagactcgggccgtggccgcctacagaacatggtccaagacaattcctgggaaagttcagttcttctcaagtgagggttctgacacatctgtaccaattccagtagtgccactacggggtgtggacgactcctacccgccccagaagaagtccttcatgatgctcaagtacatgcacgaccactacttggacaagtatgaatggtttatgagagcagatgatgacgtgtacatcaaaggagaccgtctggagaacttcctgaggagtttgaacagcagcgagcccctctttcttgggcagacaggcctgggcaccacggaagaaatgggaaaactggccctggagcctggtgagaacttctgcatgggggggcctggcgtgatcatgagccgggaggtgcttcggagaatggtgccgcacattggcaagtgtctccgggagatgtacaccacccatgaggacgtggaggtgggaaggtgtgtccggaggtttgcaggggtgcagtgtgtctggtcttatgagatgcagcagcttttttatgagaattacgagcagaacaaaaaggggtacattagagatctccataacagtaaaattcaccaagctatcacattacaccccaacaaaaacccaccctaccagtacaggctccacagctacatgctgagccgcaagatatccgagctccgccatcgcacaatacagctgcaccgcgaaattgtcctgatgagcaaatacagcaacacagaaattcataaagaggacctccagctgggaatccctccctccttcatgaggtttcagccccgccagcgagaggagattctggaatgggagtttctgactggaaaatacttgtattcggcagttgacggccagccccctcgaagaggaatggactccgcccagagggaagccttggacgacattgtcatgcaggtcatggagatgatcaatgccaacgccaagaccagagggcgcatcattgacttcaaagagatccagtacggctaccgccgggtgaaccccatgtatggggctgagtacatcctggacctgctgcttctgtacaaaaagcacaaagggaagaaaatgacggtccctgtgaggaggcacgcgtatttacagcagactttcagcaaaatccagtttgtggagcatgaggagctggatgcacaagagttggccaagagaatcaatcaggaatctggatccttgtcctttctctcaaactccctgaagaagctcgtcccctttcagctccctgggtcgaagagtgagcacaaagaacccaaagataaaaagataaacatactgattcctttgtctgggcgtttcgacatgtttgtgagatttatgggaaactttgagaagacgtgtcttatccccaatcagaacgtcaagctcgtggttctgcttttcaattctgactccaaccctgacaaggccaaacaagttgaactgatgacagattaccgcattaagtaccctaaagccgacatgcagattttgcctgtgtctggagagttttcaagagccctggccctggaagtaggatcctcccagtttaacaatgaatctttgctcttcttctgcgacgtcgacctcgtctttactacagaattccttcagcgatgtcgagcaaatacagttctgggccaacaaatatattttccaatcatcttcagccagtatgacccaaagattgtttatagtgggaaagttcccagtgacaaccattttgcctttactcagaaaactggcttctggagaaactatgggtttggcatcacgtgtatttataagggagatcttgtccgagtgggtggctttgatgtttccatccaaggctgggggctggaggatgtggaccttttcaacaaggttgtccaggcaggtttgaagacgtttaggagccaggaagtaggagtagtccacgtccaccatcctgtcttttgtgatcccaatcttgaccccaaacagtacaaaatgtgcttggggtccaaagcatcgacctatgggtccacacagcagctggctgagatgtggctggaaaaaaatgatccaagttacagtaaaagcagcaataataatggctcagtgaggacagcctaatgtccagctttgctggaaaagacgtttttaattatctaatttatttttcaaaaattttttgtatgatcagtttttgaagtccgtatacaaggatatattttacaagtggttttcttacataggactcctttaagattgagctttctgaacaagaaggtgatcagtgtttgcctttgaacacatcttcttgctgaacattatgtagcagacctgcttaactttgacttgaaatgtacctgatgaacaaaacttttttaaaaaaatgttttcttttgagaccctttgctccagtcctatggcagaaaacgtgaacattcctgcaaagtattattgtaacaaaacactgtaactctggtaaatgttctgttgtgattgttaacattccacagattctaccttttgtgttttgtttttttttttttacaattgttttaaagccatttcatgttccagttgtaagataaggaaatgtgataatagctgtttcatcattgtcttcaggagagctttccagagttgatcatttcccctcatggtactctgctcagcatggccacgtaggttttttgtttgttttgttttgttctttttttgagacggagtctcactctgttacccaggctggaatgcagtggcgcaatcttggctcactttaacctccacttccctggttcaagcaattcccctgcctttgcctcccgagtagctgggattacaggcacacaccaccacgcccagctagtttttttgtatttttagtagagacggggtttcaccatgcaagcccagctggccacgtaggttttaaagcaaggggcgtgaagaaggcacagtgaggtatgtggctgttctcgtggtagttcattcggcctaaatagacctggcattaaatttcaagaaggatttggcattttctcttcttgacccttctctttaaagggtaaaatattaatgtttagaatgacaaagatgaattattacaataaatctgatgtacacagactgaaacacacacacatacaccctaatcaaaacgttggggaaaaatgtatttggttttgttcctttcatcctgtctgtgttatgtgggtggagatggttttcattctttcattactgttttgttttatcctttgtatctgaaatacctttaatttatttaatatctgttgttcagagctctgccatttcttgagtacctgttagttagtattatttatgtgtatcgggagtgtgtttagtctgttttatttgcagtaaaccgatctccaaagatttccttttggaaacgctttttcccctccttaatttttatattccttactgttttactaaatattaagtgttctttgacaattttggtgctcatgtgttttggggacaaaagtgaaatgaatctgtcattataccagaaagttaaattctcagatcaaatgtgccttaataaatttgttttcatttagatttcaaacagtgatagacttgccattttaatacacgtcattggagggctgcgtatttgtaaatagcctgatgctcatttggaaaaataaaccagtgaacaatatttttctattgtacttttcagaaccattttgtctcattattcctgttttagctgaagaattgtattacatttggagagtaaaaaacttaaacacg

SEQ ID NO: 2136 - protein, 802 aa, Homo sapien
MAARGRRAWLSVLLGLVLGFVLASRLVLPRASELKRAGPRRRASPEGCRSGQAAASQAGGARGDARGAQLWPPGSDPDGGPRDRNFLFVGVMTAQKYLQTRAVAAYRTWSKTIPGKVQFFSSEGSDTSVPIPVVPLRGVDDSYPPQKKSFMMLKYMHDHYLDKYEWFMRADDDVYIKGDRLENFLRSLNSSEPLFLGQTGLGTTEEMGKLALEPGENFCMGGPGVIMSREVLRRMVPHIGKCLREMYTTHEDVEVGRCVRRFAGVQCVWSYEMQQLFYENYEQNKKGYIRDLHNSKIHQAITLHPNKNPPYQYRLHSYMLSRKISELRHRTIQLHREIVLMSKYSNTEIHKEDLQLGIPPSFMRFQPRQREEILEWEFLTGKYLYSAVDGQPPRRGMDSAQREALDDIVMQVMEMINANAKTRGRIIDFKEIQYGYRRVNPMYGAEYILDLLLLYKKHKGKKMTVPVRRHAYLQQTFSKIQFVEHEELDAQELAKRINQESGSLSFLSNSLKKLVPFQLPGSKSEHKEPKDKKINILIPLSGRFDMFVRFMGNFEKTCLIPNQNVKLVVLLFNSDSNPDKAKQVELMTDYRIKYPKADMQILPVSGEFSRALALEVGSSQFNNESLLFFCDVDLVFTTEFLQRCRANTVLGQQIYFPIIFSQYDPKIVYSGKVPSDNHFAFTQKTGFWRNYGFGITCIYKGDLVRVGGFDVSIQGWGLEDVDLFNKVVQAGLKTFRSQEVGVVHVHHPVFCDPNLDPKQYKMCLGSKASTYGSTQQLAEMWLEKNDPSYSKSSNNNGSVRTA

SEQ ID NO: 2137 - DNA, 1698 bp, Homo sapien
acaggaggagacagcctcccggcccggggaggacaagtcgctgccacctttggctgccgacgtgattccctgggacggtccgtttcctgccgtcaactgccggccgagttgggtctccgtggttcaggccggctcccccttcctggtctcccttctcccgctgggccggtttatcgggaggagattgtcttccagggctagcaattggacttttgatgatgtttgacccagcggcaggaatagcaggcaacgtgatttcaaagctgggctcagctcatgtttcttctctcgtgtaatcgcaaaacccattttggagcaggaattccaatcatgtctgtgatggtggtgagaaagaaggtgacacggaaatgggagaaactcccaggcaggaacaccttttgctgtgatggccgcgtcatgatggcccggcaaaagggcattttctacctgacccttttcctcatcctggggacatgtacactcttcttcgcctttgagtgccgctacctggctgttcagctgtctcctgccatccctgtatttgctgccatgctcttccttttctccatggctacactgttgaggaccagcttcagtgaccctggagtgattcctcgggcgctaccagatgaagcagctttcatagaaatggagatagaagctaccaatggtgcggtgccgggctaccagcgaccaccgcctcgtatcaagaatttccagataaacaaccagattgtgaaactgaaatactgttacacatgcaagatcttccggcctccccgggcctcccattgcagcatctgtgacaactgtgtggagcgcttcgaccatcactgcccctgggtggggaattgtgttggaaagaggaactaccgctacttctacctcttcatcctttctctctccctcctcacaatctatgtcttcgccttcaacatcgtctatgtggccctcaaatctttgaaaattggcttcttggagacattgaaagaaactcctggaactgttctagaagtcctcatttgcttctttacactctggtccgtcgtgggactgactggatttcatactttcctcgtggctctcaaccagacaaccaatgaagacatcaaaggatcatggacagggaagaatcgcgtccagaatccctacagccatggcaatattgtgaagaactgctgtgaagtgctgtgtggccccttgccccccagtgtgctggatcgaaggggtattttgccactggaggaaagtggaagtcgacctcccagtactcaagagaccagtagcagcctcttgccacagagcccagcccccacagaacacctgaactcaaatgagatgccggaggacagcagcactcccgaagagatgccacctccagagcccccagagccaccacaggaggcagctgaagctgagaagtagcctatctatggaagagacttttgtttgtgtttaattagggctatgagagatttcaggtgagaagttaaacctgagacagagagcaagtaagctgtcccttttaattgtttttctttggtctttagtcacccagttgcacactgggcattttcttggctggcaagctttttttaaaatttgctgaaacttcaagggcagtggccaggaaggatgttcagttcacctctggataaactgggaaaaatggggtctcttggggccgggcactggttt

SEQ ID NO: 2138 - protein, 382 aa, Homo sapien
MFLLSCNRKTHFGAGIPIMSVMVVRKKVTRKWEKLPGRNTFCCDGRVMMARQKGIFYLTLFLILGTCTLFFAFECRYLAVQLSPAIPVFAAMLFLFSMATLLRTSFSDPGVIPRALPDEAAFIEMEIEATNGAVPGYQRPPPRIKNFQINNQIVKLKYCYTCKIFRPPRASHCSICDNCVERFDHHCPWVGNCVGKRNYRYFYLFILSLSLLTIYVFAFNIVYVALKSLKIGFLETLKETPGTVLEVLICFFTLWSVVGLTGFHTFLVALNQTTNEDIKGSWTGKNRVQNPYSHGNIVKNCCEVLCGPLPPSVLDRRGILPLEESGSRPPSTQETSSSLLPQSPAPTEHLNSNEMPEDSSTPEEMPPPEPPEPPQEAAEAEK

SEQ ID NO: 2139 - DNA, 1377 bp, Homo sapien
ctttgttttgcttcgagatggctgcggggatgtatttggaacattatctggacagtattgaaaaccttccctttgaattacagagaaactttcagctcatgagggacctagaccaaagaacagaggacctgaaggctgaaattgacaagttggccactgagtatatgagtagtgcccgcagcctgagctccgaggaaaaattggcccttctcaaacagatccaggaagcctatggcaagtgcaaggaatttggtgacgacaaggtgcagcttgccatgcagacctatgagatggtggacaaacacattcggcggctggacacagacctggcccgttttgaggctgatctcaaggagaaacagattgagtcaagtgactatgacagctcttccagcaaaggcaaaaagaaaggccggactcaaaaggagaagaaagctgctcgtgctcgttccaaagggaaaaactcggatgaagaagcccccaagactgcccagaagaagttaaagctcgtgcgcacaagtcctgagtatgggatgccctcagtgacctttggcagtgtccacccctctgatgtgttggatatgcctgtggatcccaacgaacccacctattgcctttgtcaccaggtctcctatggagagatgattggctgtgacaaccctgattgttccattgagtggttccattttgcctgtgtggggctgacaaccaagcctcgggggaaatggttttgcccacgctgctcccaagaacggaagaagaaatagataagggccttggattccaacacagtttcttccacatcccctgacttgggctagtgggcagaggaatgcctgtgctggggccaggggttcagggaggagtggatggcacagtgctgtcatcccttctcctcccctctccccactcccggtgctgaggctgcatcagaccctggtagggaggggtgccgcagccactaacggtatgtgctctccttcagccctctccttcggagggacgtggtcttgcccactgtccttttgcctccatgctgaggtcggtgctgtatttcagagggagggtccttttcattctccttgctttgtatttaaggactggggcatagcatgggggcagtcccccagacctcttcattccccctcctgtggtgagggctaggtgtgatcaacacttttcttctccattcccttcctgcttttttcatggtggggatccaccaggtcatctagctctggccctagttgaagggcaccccttcctctgtgccaagaggattcatcctgggagagggggcaaggtggaatgcagataactcacatgtaaaaggaacttgggtaggtaaataaaagctatacatgttgaaaaaaaaaa

SEQ ID NO: 2140 - protein, 249 aa, Homo sapien
MAAGMYLEHYLDSIENLPFELQRNFQLMRDLDQRTEDLKAEIDKLATEYMSSARSLSSEEKLALLKQIQEAYGKCKEFGDDKVQLAMQTYEMVDKHIRRLDTDLARFEADLKEKQIESSDYDSSSSKGKKKGRTQKEKKAARARSKGKNSDEEAPKTAQKKLKLVRTSPEYGMPSVTFGSVHPSDVLDMPVDPNEPTYCLCHQVSYGEMIGCDNPDCSIEWFHFACVGLTTKPRGKWFCPRCSQERKKK

SEQ ID NO: 2141 - DNA, 1002 bp, Homo sapien
tgcagtctgtctgagggcggccgaagtggctggctcatttaagatgaggcttctgctgcttctcctagtggcggcgtctgcgatggtccggagcgaggcctcggccaatctgggcggcgtgccagcaagagattaaagatgcagtacgccacggggccgctgctcaagttccagatttgtgtttcctgaggttataggcgggtgtttgaggagtacatgcgggttattagccagcggtacccagacatccgcattgaaggagagaattacctccctcaaccaatatatagacacatagcatctttcctgtcagtcttcaaactagtattaataggcttaataattgttggcaaggatccttttgctttctttggcatgcaagctcctagcatctggcagtggggccaagaaaataaggtttatgcatgtatgatggttttcttcttgagcaacatgattgagaaccagtgtatgtcaacaggtgcatttgagataactttaaatgatgtacctgtgtggtctaagctggaatctggtcaccttccatccatgcaacaacttgttcaaattcttgacaatgaaatgaagctcaatgtgcatatggattcaatcccacaccatcgatcatagcaccacctatcagcactgaaaactcttttgcattaagggatcattgcaagagcagcgtgactgacattatgaaggcctgtactgaagacagcaagctgttagtacagaccagatgctttcttggcaggctcgttgtacctcttggaaaacctcaatgcaagatagtgtttcagtgctggcatattttggaattctgcacattcatggagtgcaataatactgtatagctttcccccacctcccacaaaatcacccagttaatgtgtgtgtgtgtgttttttttaaggtaaacattactacttgtaactttttttctttagtcatatttggaaaaagtagaaaattggagttacatttggattttttttccaa

SEQ ID NO: 2142 - protein, 163 aa, Homo sapien
  unsure 17: unknown amino acid
MQYATGPLLKFQICVSXGYRRVFEEYMRVISQRYPDIRIEGENYLPQPIYRHIASFLSVFKLVLIGLIIVGKDPFAFFGMQAPSIWQWGQENKVYACMMVFFLSNMIENQCMSTGAFEITLNDVPVWSKLESGHLPSMQQLVQILDNEMKLNVHMDSIPHHRS

SEQ ID NO: 2143 - DNA, 2440 bp, Homo sapien
cggccttgtcagctcacagcaggcgttaacagcctctaattgaggaaactgtggctggacaggttgcaaggcagttctgctccccatcgtcctcttgctgactggggactgctgagcccgtgcacggcagagagtctggtggggtggaggggctggcctggcccctctgtcctgtggaaatgctggggcaagtggtcaccctcatactcctcctgctcctcaaggtgtatcagggcaaaggatgccagggatcagctgaccatgtggttagcatctcgggagtgcctcttcagttacaaccaaacagcatacagacgaaggttgacagcattgcatggaagaagttgctgccctcacaaaatggatttcatcacatattgaagtgggagaatggctctttgccttccaatacttccaatgatagattcagttttatagtcaagaacttgagtcttctcatcaaggcagctcagcagcaggacagtggcctctactgcctggaggtcaccagtatatctggaaaagttcagacagccacgttccaggtttttgtatttgataaagttgagaaaccccgcctacaggggcaggggaagatcctggacagagggagatgccaagtggctctgtcttgcttggtctccagggatggcaatgtgtcctatgcttggtacagagggagcaagctgatccagacagcagggaacctcacctacctggacgaggaggttgacattaatggcactcacacatatacctgcaatgtcagcaatcctgttagctgggaaagccacaccctgaatctcactcaggactgtcagaatgcccatcaggaattcagattttggccgtttttggtgatcatcgtgattctaagcgcactgttccttggcacccttgcctgcttctgtgtgtggaggagaaagaggaaggagaagcagtcagagaccagtcccaaggaatttttgacaatttacgaagatgtcaaggatctgaaaaccaggagaaatcacgagcaggagcagacttttcctggaggggggagcaccatctactctatgatccagtcccagtcttctgctcccacgtcacaagaacctgcatatacattatattcattaattcagccttccaggaagtctggatccaggaagaggaaccacagcccttccttcaatagcactatctatgaagtgattggaaagagtcaacctaaagcccagaaccctgctcgattgagccgcaaagagctggagaactttgatgtttattcctagttgctgcagcaattctcacctttcttgcacatcagcatctgctttgggaattggcacagtggatgacggcacaggagtctctatagaacacttcctagtctggagaggatatggaaatttgttcttgttctatattttgttttgaaaatgatgtctaacaaccatgataagagcaaggctgttaaataatatcttccaatttacagatcagacatgaatgggtggaggggttaggttgttcacaaaaggccacattccaagtatttgtaatctagaaagtgttatgtaagtgatgttattagcatcgagattccctccacctgattttcaagctgtcacttgtttccttttctcccctctctgggttgactgcatttctagactctcgccggcccaggcccatcttccaaagcaagaggaaggaatgataatggtgactcaggggaagaagaaacagccctcctctgaaagcctggactgtccggctgtgaactggctggcaggttctgcacgtgggtgggggccagggcctgggctttactcaattgcagagaaaaaactttctccctgcatctcatacctttacctctggccagttggccaccagggggagtgggctgaagggagagtagatggtgcaaagcaagcccatctctgagtagaaaaatcacccagagcacatgctgacctgataactggggtgttgagaccagctttgtccatggtatgatgtttgatttatgaagacgcattgttagaaatccatttggcttcttcatagaagtggcttcccagaggaagaggcctctcagaaaccatgttctatttaagttctgagtcctgatgagtgttccccaggatgcacattgaagggagggctcaggcagctgagggctgagaatgaggcagttggaatctagacactatgctgggttccctgagtcgtcaggccagacatttcaacaaggctgtggggagcagggctgtgactctggctgagcccaggaaagcgacaagggtgaactgggagaggacttactcagagaccccaacaggtgatactgcacaaagcctggttcttcaattttcctaccctgtatctaacataggagtttcatataaaacggtgatatcatgcagatgcagtctgaattccttgcctg

SEQ ID NO: 2144 - protein, 365 aa, Homo sapien
MLGQVVTLILLLLLKVYQGKGCQGSADHVVSISGVPLQLQPNSIQTKVDSIAWKKLLPSQNGFHHILKWENGSLPSNTSNDRFSFIVKNLSLLIKAAQQQDSGLYCLEVTSISGKVQTATFQVFVFDKVEKPRLQGQGKILDRGRCQVALSCLVSRDGNVSYAWYRGSKLIQTAGNLTYLDEEVDINGTHTYTCNVSNPVSWESHTLNLTQDCQNAHQEFRFWPFLVIIVILSALFLGTLACFCVWRRKRKEKQSETSPKEFLTIYEDVKDLKTRRNHEQEQTFPGGGSTIYSMIQSQSSAPTSQEPAYTLYSLIQPSRKSGSRKRNHSPSFNSTIYEVIGKSQPKAQNPARLSRKELENFDVYS

SEQ ID NO: 2145 - DNA, 5601 bp, Homo sapien
ggcccggctgcgaggaggaggcggcggcggcgcaggaggatgtacttggtggcgggggacagggggttggccggctgcgggcacctcctggtctcgctgctggggctgctgctgctgctggcgcgctccggcacccgggcgctggtctgcctgccctgtgacgagtccaagtgcgaggagcccaggaactgcccggggagcatcgtgcagggcgtctgcggctgctgctacacgtgcgccagccagaggaacgagagctgcggcggcaccttcgggatttacggaacctgcgaccgggggctgcgttgtgtcatccgccccccgctcaatggcgactccctcaccgagtacgaagcgggcgtttgcgaagatgagaactggactgatgaccaactgcttggttttaaaccatgcaatgaaaaccttattgctggctgcaatataatcaatgggaaatgtgaatgtaacaccattcgaacctgcagcaatccctttgagtttccaagtcaggatatgtgcctttcagctttaaagagaattgaagaagagaagccagattgctccaaggcccgctgtgaagtccagttctctccacgttgtcctgaagattctgttctgatcgagggttatgctcctcctggggagtgctgtcccttacccagccgctgcgtgtgcaaccccgcaggctgtctgcgcaaagtctgccagccgggaaacctgaacatactagtgtcaaaagcctcagggaagccgggagagtgctgtgacctctatgagtgcaaaccagttttcggcgtggactgcaggactgtggaatgccctcctgttcagcagaccgcgtgtcccccggacagctatgaaactcaagtcagactaactgcagatggttgctgtactttgccaacaagatgcgagtgtctctctggcttatgtggtttccccgtgtgtgaggtgggatccactccccgcatagtctctcgtggcgatgggacacctggaaagtgctgtgatgtctttgaatgtgttaatgatacaaagccagcctgcgtatttaacaatgtggaatattatgatggagacatgtttcgaatggacaactgtcggttctgtcgatgccaagggggcgttgccatctgcttcactgcccagtgtggtgagataaactgcgagaggtactacgtgcccgaaggagagtgctgcccagtgtgtgaagatccagtgtatccttttaataatcccgctggctgctatgccaatggcctgatccttgcccacggagaccggtggcgggaagacgactgcacattctgccagtgcgtcaacggtgaacgccactgcgttgcgaccgtctgcggacagacctgcacaaaccctgtgaaagtgcctggggagtgttgccctgtgtgcgaagaaccaaccatcatcacagttgatccacctgcatgtggggagttatcaaactgcactctgacagggaaggactgcattaatggtttcaaacgcgatcacaatggttgtcggacctgtcagtgcataaacaccgaggaactatgttcagaacgtaaacaaggctgcaccttgaactgtcccttcggtttccttactgatgcccaaaactgtgagatctgtgagtgccgcccaaggcccaagaagtgcagacccataatctgtgacaagtattgtccacttggattgctgaagaataagcacggctgtgacatctgtcgctgtaagaaatgtccagagctctcatgcagtaagatctgccccttgggtttccagcaggacagtcacggctgtcttatctgcaagtgcagagaggcctctgcttcagctgggccacccatcctgtcgggcacttgtctcaccgtggatggtcatcatcataaaaatgaggagagctggcacgatgggtgccgggaatgctactgtctcaatggacgggaaatgtgtgccctgatcacctgcccggtgcctgcctgtggcaaccccaccattcaccctggacagtgctgcccatcatgtgcagatgactttgtggtgcagaagccagagctcagtactccctccatttgccacgcccctggaggagaatactttgtggaaggagaaacgtggaacattgactcctgtactcagtgcacctgccacagcggacgggtgctgtgtgagacagaggtgtgcccaccgctgctctgccagaacccctcacgcacccaggattcctgctgcccacagtgtacagatcaaccttttcggccttccttgtcccgcaataacagcgtacctaattactgcaaaaatgatgaaggggatatattcctggcagctgagtcctggaagcctgacgtttgtaccagctgcatctgcattgatagcgtaattagctgtttctctgagtcctgcccttctgtatcctgtgaaagacctgtcttgagaaaaggccagtgttgtccctactgcatagaagacacaattccaaagaaggtggtgtgccacttcagtgggaaggcctatgccgacgaggagcggtgggaccttgacagctgcacccactgctactgcctgcagggccagaccctctgctcgaccgtcagctgcccccctctgccctgtgttgagcccatcaacgtggaaggaagttgctgcccaatgtgtccagaaatgtatgtcccagaaccaaccaatatacccattgagaagacaaaccatcgaggagaggttgacctggaggttcccctgtggcccacgcctagtgaaaatgatatcgtccatctccctagagatatgggtcacctccaggtagattacagagataacaggctgcacccaagtgaagattcttcactggactccattgcctcagttgtggttcccataattatatgcctctctattataatagcattcctattcatcaatcagaagaaacagtggataccactgctttgctggtatcgaacaccaactaagccttcttccttaaataatcagctagtatctgtggactgcaagaaaggaaccagagtccaggtggacagttcccagagaatgctaagaattgcagaaccagatgcaagattcagtggcttctacagcatgcaaaaacagaaccatctacaggcagacaatttctaccaaacagtgtgaagaaaggcaactaggatgaggtttcaaaagacggaagacgactaaatctgctctaaaaagtaaactagaatttgtgcacttgcttagtggattgtattggattgtgacttgatgtacagcgctaagaccttactgggatgggctctgtctacagcaatgtgcagaacaagcattcccacttttcctcaagataactgaccaagtgttttcttagaaccaaagtttttaaagttgctaagatatatttgcctgtaagatagctgtagagatatttggggtggggacagtgagtttggatggggaaatgggtgggagggtggtgttgggaagaaaaattggtcagcttggctcggggagaaacctggtaacataaaagcagttcagtggcccagaggttatttttttcctattgctctgaagactgcactggttgctgcaaagctcaggcctgaatgagcaggaaacaaaaaaggccttgcgacccagctgccataaccaccttagaactaccagacgagcacatcagaaccctttgacagccatcccaggtctaaagccacaagtttcttttctatacagtcacaactgcagtaggcagtgaggaagccagagaaatgcgatagcggcatttctctaaagcgggttattaaggatatatacagttacactttttgctgcttttattttcttccaagccaatcaatcagccagttcctagcagagtcagcacatgaacaagatctaagtcatttcttgatgtgagcactggagcttttttttttttacaacgtgacaggaagaggagggagagggtgacgaacaccaggcatttccaggggctatatttcactgtttgttgttgctttgttctgttatattgttggttgttcatagtttttgttgaagctctagcttaagaagaaactttttttaaaaagactgtttggggattctttttccttattatatactgattctacaaaatagaaactacttcattttaattgtatattattcaagcacctttgttgaagctcaaaaaaaatgatgcctctttaaactttagcaattataggagtatttatgtaactatcttatgcttcaaaaaacaaaagtatttgtgtgcatgtgtatataatatatatatatacatatatatttatacacatacaatttatgttttcctgttgaatgtatttttatgagattttaaccagaacaaaggcagataaacaggcattccatagcagtgcttttgatcacttacaaattttttgaataacacaaaatctcattctacctgcagtttaattggaaagatgtgtgtgtgagagtatgtatgtgtgtgtgtgtgtgtgtgtgtgtgcgcgcgcacgcacgccttgagcagtcagcattgcacctgctatggagaagggtattcctttattaaaatcttcctcatttggatttgctttcagttggttttcaatttgctcactggccagagacattgatggcagttcttatctgcatcactaatcagctcctggattttttttttttttttttcaaacaatggtttgaaacaactactggaatattgtccacaataagctggaagtttgttgtagtatgcctcaaatataactgactgtatactatagtggtaacttttcaaacagcccttagcacttttatactaattaacccatttgtgcattgagttttcttttaaaaatgcttgttgtgaaagacacagatacccagtatgcttaacgtgaaaagaaaatgtgttctgttttgtaaaggaactttcaagtattgttgtaaatacttggacagaggttgctgaactttaaaaaaaattaatttattattataatgacctaatttattaatctgaagattaaccatttttttgtcttagaatatcaaaaagaaaaagaaaaaggtgttctagctgtttgcatcaaaggaaaaaaagatttattatcaaggggcaatatttttatcttttccaaaataaatttgttaatgatacattacaaaaatagattgacatcagcctgattagtataaattttgttggtaattaatccattcctggcataaaaagtctttatcaaaaaaaattgtagatgcttgctttttgttttttcaatcatggccatattatgaaaatactaacaggatataggacaaggtgtaaatttttttattattattttaaagatatgatttatcctgagtgctgtatctattactcttttactttggttcctgttgtgctcttgtaaaagaaaaatataatttcctgaagaataaaatagatatatggcacttggagtgcatcatagttctacagtttgtttttgttttcttcaaaaaagctgtaagagaattatctgcaacttgattcttggcaggaaataaacattttgagttgaaatcaaaaaaaaaaaaaaaaaa

SEQ ID NO: 2146 - protein, 1036 aa, Homo sapien
MYLVAGDRGLAGCGHLLVSLLGLLLLLARSGTRALVCLPCDESKCEEPRNCPGSIVQGVCGCCYTCASQRNESCGGTFGIYGTCDRGLRCVIRPPLNGDSLTEYEAGVCEDENWTDDQLLGFKPCNENLIAGCNIINGKCECNTIRTCSNPFEFPSQDMCLSALKRIEEEKPDCSKARCEVQFSPRCPEDSVLIEGYAPPGECCPLPSRCVCNPAGCLRKVCQPGNLNILVSKASGKPGECCDLYECKPVFGVDCRTVECPPVQQTACPPDSYETQVRLTADGCCTLPTRCECLSGLCGFPVCEVGSTPRIVSRGDGTPGKCCDVFECVNDTKPACVFNNVEYYDGDMFRMDNCRFCRCQGGVAICFTAQCGEINCERYYVPEGECCPVCEDPVYPFNNPAGCYANGLILAHGDRWREDDCTFCQCVNGERHCVATVCGQTCTNPVKVPGECCPVCEEPTIITVDPPACGELSNCTLTGKDCINGFKRDHNGCRTCQCINTEELCSERKQGCTLNCPFGFLTDAQNCEICECRPRPKKCRPIICDKYCPLGLLKNKHGCDICRCKKCPELSCSKICPLGFQQDSHGCLICKCREASASAGPPILSGTCLTVDGHHHKNEESWHDGCRECYCLNGREMCALITCPVPACGNPTIHPGQCCPSCADDFVVQKPELSTPSICHAPGGEYFVEGETWNIDSCTQCTCHSGRVLCETEVCPPLLCQNPSRTQDSCCPQCTDQPFRPSLSRNNSVPNYCKNDEGDIFLAAESWKPDVCTSCICIDSVISCFSESCPSVSCERPVLRKGQCCPYCIEDTIPKKVVCHFSGKAYADEERWDLDSCTHCYCLQGQTLCSTVSCPPLPCVEPINVEGSCCPMCPEMYVPEPTNIPIEKTNHRGEVDLEVPLWPTPSENDIVHLPRDMGHLQVDYRDNRLHPSEDSSLDSIASVVVPIIICLSIIIAFLFINQKKQWIPLLCWYRTPTKPSSLNNQLVSVDCKKGTRVQVDSSQRMLRIAEPDARFSGFYSMQKQNHLQADNFYQTV

SEQ ID NO: 2147 - DNA, 1026 bp, Homo sapien
aactcggtgaacaactgagggaaccaaaccagagacgcgctgaacagagagaatcaggctcaaagcaagtggaagtgggcagagattccaccaggactggtgcaaggcgcagagccagccagatttgagaagaaggcaaaaagatgctggggagcagagctgtaatgctgctgttgctgctgccctggacagctcagggcagagctgtgcctgggggcagcagccctgcctggactcagtgccagcagctttcacagaagctctgcacactggcctggagtgcacatccactagtgggacacatggatctaagagaagagggagatgaagagactacaaatgatgttccccatatccagtgtggagatggctgtgacccccaaggactcagggacaacagtcagttctgcttgcaaaggatccaccagggtctgattttttatgagaagctgctaggatcggatattttcacaggggagccttctctgctccctgatagccctgtgggccagcttcatgcctccctactgggcctcagccaactcctgcagcctgagggtcaccactgggagactcagcagattccaagcctcagtcccagccagccatggcagcgtctccttctccgcttcaaaatccttcgcagcctccaggcctttgtggctgtagccgcccgggtctttgcccatggagcagcaaccctgagtccctaaaggcagcagctcaaggatggcactcagatctccatggcccagcaaggccaagataaatctaccaccccaggcacctgtgagccaacaggttaattagtccattaattttagtgggacctgcatatgttgaaaattaccaatactgactgacatgtgatgctgacctatgataaggttgagtatttattagatgggaagggaaatttggggattatttatcctcctggggacagtttggggaggattatttattgtatttatattgaattatgtacttttttcaataaagtcttatttttgtggctaaaaaaaa

SEQ ID NO: 2148 - protein, 189 aa, Homo sapien
MLGSRAVMLLLLLPWTAQGRAVPGGSSPAWTQCQQLSQKLCTLAWSAHPLVGHMDLREEGDEETTNDVPHIQCGDGCDPQGLRDNSQFCLQRIHQGLIFYEKLLGSDIFTGEPSLLPDSPVGQLHASLLGLSQLLQPEGHHWETQQIPSLSPSQPWQRLLLRFKILRSLQAFVAVAARVFAHGAATLSP

SEQ ID NO: 2149 - DNA, 945 bp, Homo sapien
gcaggtaggtggacggagagatagcagcgacgaggacaggccaaacagtgacagccacgtagaggatctggcagacaaagagacaaggtgagaaggagactttggaagtgacccaccatggggctcagcatctttttgctcctgtgtgttcttgggctcagccaggcagccacaccgaagattttcaatggcactgagtgtgggcgtaactcacagccgtggcaggtggggctgtttgagggcaccagcctgcgctgcgggggtgtccttattgaccacaggtgggtcctcacagcggctcactgcagcggcagcaggtactgggtgcgcctgggggaacacagcctcagccagctcgactggaccgagcagatccggcacagcggcttctctgtgacccatcccggctacctgggagcctcgacgagccacgagcacgacctccggctgctgcggctgcgcctgcccgtccgcgtaaccagcagcgttcaacccctgcccctgcccaatgactgtgcaaccgctggcaccgagtgccacgtctcaggctggggcatcaccaaccacccacggaacccattcccggatctgctccagtgcctcaacctctccatcgtctcccatgccacctgccatggtgtgtatcccgggagaatcacgagcaacatggtgtgtgcaggcggcgtcccggggcaggatgcctgccagggtgattctgggggccccctggtgtgtgggggagtccttcaaggtctggtgtcctgggggtctgtggggccctgtggacaagatggcatccctggagtctacacctatatttgcaactccactcttgttggcctgggaacttcttggaactttaactcctgccagcccttctaagacccacgagcggggtgagagaagtgtgcaatagtctggaataaatataaatgaaggaggggc

SEQ ID NO: 2150 - protein, 254 aa, Homo sapien
MGLSIFLLLCVLGLSQAATPKIFNGTECGRNSQPWQVGLFEGTSLRCGGVLIDHRWVLTAAHCSGSRYWVRLGEHSLSQLDWTEQIRHSGFSVTHPGYLGASTSHEHDLRLLRLRLPVRVTSSVQPLPLPNDCATAGTECHVSGWGITNHPRNPFPDLLQCLNLSIVSHATCHGVYPGRITSNMVCAGGVPGQDACQGDSGGPLVCGGVLQGLVSWGSVGPCGQDGIPGVYTYICNSTLVGLGTSWNFNSCQPF

SEQ ID NO: 2151 - DNA, 2820 bp, Homo sapien
gggatttttaaaaaatcaaaatacaaatccaactttttgagttttcgttgtcattgctcttatctttcctgagtcacttcccattttccaaactcagcaaccccagtttgcgagtctggtttcatgaacctttgtaaggtgtttggtgcggtcacrgtgtatacttgccgtgtagtatttgactcagcgcgatctgccttgagtcattttaccgcggccatttactactgccgttgagccctgtccacgccttgggagtgttgatatgttgagagttttctgtctggctgrggagggatcatttagtttttgcggacgtatgttgcactgaggatttagggagagagcaagatttctgttgaggaggttcagaagtataaggaatcgggagagtagataggagtgaagcatttggcagcgtaaagaagcttggcttagctttaatggattagggagagattgctatctagcattattacatgttattgttctctttgctattttatacacctagaacaacctttccctcggggttaacaaacatcttcaactctgttttctgtatggctcctgactcttacctttgttttaggaggcttccctcttcagaggaaactgggagaagccaatttccactgcttctttttcctgtgcctttttaacactcaaacccagaacacttaatcctctgcagctcgtgcaaaaattcagtctgtaatttaaaatgtgtgcacggtacactgctgaccatgggcatgtctattgtttgtatctgtaatgtgtatgtccatttcagtgttgtctgttttagtatgcaggtgatagactagagaacaagacctctgtctccgtagcatcctggagcagtctgaatgccagaatggataaccgttttgctacagcatttgtaattgcttgtgtgcttagcctcatttccaccatctacatggcagcctccattggcacagacttctggtatgaatatcgaagtccagttcaagaaaattccagtgatttgaataaaagcatctgggatgaattcattagtgatgaggcagatgaaaagacttataatgatgcactttttcgatacaatggcacagtgggattgtggagacggtgtatcaccatacccaaaaacatgcattggtatagcccaccagaaaggacagagtcatttgatgtggtcacaaaatgtgtgagtttcacactaactgagcagttcatggagaaatttgttgatcccggaaaccacaatagcgggattgatctccttaggacctatctttggcgttgccagttccttttaccttttgtgagtttaggtttgatgtgctttggggctttgatcggactttgtgcttgcatttgccgaagcttatatcccaccattgccacgggcattctccatctccttgcaggtctgtgtacactgggctcagtaagttgttatgttgctggaattgaactactccaccagaaactagagctccctgacaatgtatccggtgaatttggatggtccttctgcctggcttgtgtctctgctcccttacagttcatggcttctgctctcttcatctgggctgctcacaccaaccggaaagagtacaccttaatgaaggcatatcgtgtggcatgagcaagaaactgcctgctttacaattgccatttttatttttttaaaataatactgatattttccccacctctcaattgtttttaatttttatttgtggatataccattttattatgaaaatctattttatttatacacattcaccactaaatacacacttaataccactaaaatttatgtggtttactttaagcgatgccatctttcaaataaactaatctaggtctagacagaaagaaatggatagagacttgacacaaatttatgaaagaaaattgggagtaggaatgtgaccgaaaacaagttgtgctaatgtctgttagacttttcagtaaaactaaagtaactgtatctgttcaactaaaaactctatattagtttctttgggaaacctctcatcgtcaaaactttatgttcactttgctgttgtagatagccagtcaaccagcagtattagtgctgttttcaaagatttaagctctataaaattgggaaattatctaagatcattttccctaagcattgacacatagcttcatctgaggtgagatatggcagctgtttgtatctgcactgtgtctgtctacaaaaagtgaaaaatacagtgtttacttgaaattttaactttgtaactgcaagaattccagttcagccgggcgaggattagtattatttttaactctccgtaagattttcagtaccaccaaattgttttggattttttttctttcctcttcacataccagggttattaaaagtgtgctttctttttacattatattacagttacaaggtaaaattcctcaactgctatttatttattccagcccagtactataaagaacgtttcaccataatgaccctccagagctgggaaacctaccacaagatctaaagttctggctgtccattaacctccaactatggtctttatttcttgtggtaatatgatgtgcctttccttgcctaaatcccttcctggtgtgtatcaacattatttaatgtcttctaattcagtcatttttttataagtatgtctataaacattgaactttaaaaaacttatttatttattccactactgtagcaattgacagattaaaaaaatgtaacttcataatttcttaccataacctcaatgtcttttttaaaaaataaaattaaaaatgaaaagagaaa

SEQ ID NO: 2152 - protein, 253 aa, Homo sapien
MDNRFATAFVIACVLSLISTIYMAASIGTDFWYEYRSPVQENSSDLNKSIWDEFISDEADEKTYNDALFRYNGTVGLWRRCITIPKNMHWYSPPERTESFDVVTKCVSFTLTEQFMEKFVDPGNHNSGIDLLRTYLWRCQFLLPFVSLGLMCFGALIGLCACICRSLYPTIATGILHLLAGLCTLGSVSCYVAGIELLHQKLELPDNVSGEFGWSFCLACVSAPLQFMASALFIWAAHTNRKEYTLMKAYRVA

SEQ ID NO: 2153 - DNA, 3003 bp, Homo sapien
ctagttctagatccggcgagtagctggcggtcccgggtgctgctggttagtgtgctctgagggagggtccgagccagccgctgttttgccggaggagcccctcaggccgtagtaagcattaataatgtctttcatctttgagtggatctacaatggcttcagcagtgtgctccagttcctaggactgtacaagaaatctggaaaacttgtattcttaggtttggataatgcaggcaaaaccactcttcttcacatgctcaaagatgacagattgggccaacatgttccaacactacatccgacatcagaagagctaacaattgctggaatgacctttacaacttttgatcttggtgggcacgagcaagcacgtcgcgtttggaaaaattatctcccagcaattaatgggattgtctttctggtggactgtgcagatcattctcgcctcgtggaatccaaagttgagcttaatgctttaatgactgatgaaacaatatccaatgtgccaatccttatcttgggtaacaaaattgacagaacagatgcaatcagtgaagaaaaactccgtgagatatttgggctttatggacagaccacaggaaaggggaatgtgaccctgaaggagctgaatgctcgccccatggaagtgttcatgtgcagtgtgctcaagaggcaaggttacggcgagggtttccgctggctctcccagtatattgactgatgtttggacggtgaaaataaaagagttttacttctctggactgatcctattcacagcttcctcatgaacttttctaatagaacaaggaaagctctccaaccatgtctggcgttgagaagccaagagtctctgtcaactctctcattgcccagtggtgacatgtgctcttctccacactgttgggaggtaatgctgccccacgtgctggtgcaggtcagtatcctgggacttggaagctggcaggatttgccgggtaaagctgtatgccatcatggggcacctgaaaagaaaaacacgtctcaccactgtggttgattcaaaagaaagtgattctattttttaaagaaagcgttgttaatgtaattggtatccctcctaactttttgagttcacaatttacttggtccagagttttctattcttttttttttttaaactaatgaatgacatttagatacttcataaaattatgaacagatatggaggccagagctcatttgggtaaacttactcctgctgagttagcaggttggtgagagaagctcccctgagctcacctgtctctctgactgccttggagtaggtggcataaccttgtgcacagagaactagaaaaggggcagaaccccggccttgcagttgtggcaggtttccactgtggtaagctaggttcattcctcatcaaggaatgtgtagcagattgttcactgtggaggagttaattatagaatgggttattgttgttattcttactcatgaagttacagattttagccagtctttgcttttatacttttgtgaaatttaatttctctctatagcaccttcctttttcgttttcagttatcaaaagtgactttgacctcataaaagagttgagaacatctctcgtgtcacatactgcaggtgcatcagttacttttgcacagattctgggggacatttttctgaataggaagacaggacaaagttaacagcttaagggctcttaattctgtgagttgaggacttaaaagtattgtagcatttgtttggatccatgaaaaatgtattcagtgggctttaaaatttccatttgcagaatttggtctctcaggctgtttgggagctcttttttttacattttttctcctttgacacctattttattggtgtttaaagtaaaggttaacatctgtagcttttccaggtttttttttttttttttttgatatgaaattgtctttctccattgcagaaataagctagggaaacactaacccaaaaactttctgtagagctgttcctttggaggcagcatcacttattggcagtaaagactcagtataaaagcaccagcatccctacttgggtgatggggattaattttatagcattccattttcctagtgccacatgtgaaattggattttgatgatcttaatctatattctacccttataataaaagatcaaaagatatatctcctatgaacagattggagataggagatgaaaagttgggaggatgtctttattctaatgtgagggtagggaaaatgtggataacattactggggtgaaggaggcattgttctttagttggagttctcatttttattctccagtactgacttgtggggaaagcatactttttcactgccaggtactgaatgcagaggctcagtgaagtatatatgtgggaagtgcatgcatttcgtttattagcaaacatagctggattaagacaaagttgttggtttggaaaggggttaaagccttaagtgaacaaatctagctaacagtgaatgaactaggtaatataacttgcatatttttaatttcctttggttaaaggtcccccatacttctctgttcggagacatgagaagtatgattacttcagtgttagttttcttaattttttttttcccctatttgtcccttgtcactttgttgcaagctagaaatctgtgggttatacatagggcagctctttgtgaaagtggtttattccactggagaaaggggattgaaaatcagttagaaccaatgtatttcttgccccacggaacactattcctataagatagctgaaagaagctgctgtgaggagctcagctccaaacacaggatcagcaccttgtataggaattcccatgaattatgacttctcattctgttttatcagagtgcatatatgtcctacttcaggaaaagtaaaacagtcatttacgaaagaaagtcaatctgtatcctaagcattttaataaaaagttaaaacaaaaaaaaaaaaaaaaaaaa

SEQ ID NO: 2154 - protein, 198 aa, Homo sapien
MSFIFEWIYNGFSSVLQFLGLYKKSGKLVFLGLDNAGKTTLLHMLKDDRLGQHVPTLHPTSEELTIAGMTFTTFDLGGHEQARRVWKNYLPAINGIVFLVDCADHSRLVESKVELNALMTDETISNVPILILGNKIDRTDAISEEKLREIFGLYGQTTGKGNVTLKELNARPMEVFMCSVLKRQGYGEGFRWLSQYID

SEQ ID NO: 2155 - DNA, 1801 bp, Homo sapien
tagggcggtcgcgtaattcggcacgagggcgctcacgtatgccggcggtcagtggtccaggtcccttattctgccttctcctcctgctcctggacccccacagccctgagacggggtgtcctcctctacgcaggtttgagtacaagctcagcttcaaaggcccaaggctggcattgcctggggctggaatacccttctggagccatcatggagacgccatcctgggcctggaggaagtgcggctgacgccatccatgaggaaccggagtggcgccgtgtggagcagggcctctgtccccttctctgcctgggaagtagaggtgcaaatgagggtgacgggactggggcgccggggagcccacggcatggccgtgtggtacacccggggcaggggccatgtaggctctgtccttggggggctggcttcgtgggacggcatcgggatcttctttgactctccggcagaggatactcaggacagtcctgccatccgtgtgctggccagcgacgggcacatcccctctgagcagcctggggatggagctagccaagggctgggctcctgtcattgggacttccggaaccggccacaccccttcagagcacggatcacctactgggggcagaggctgcgcatgtccttgaacagtggcctcactcccagtgatccaggtgagttctgtgtggatgtggggcccctgcttttggtccctggaggtttctttggggtctcagcagccaccggcaccctggcagatgatcatgatgtcctgtccttcctgaccttcagcctgagtgagcccagcccagaggttccccctcagcccttcctggagatgcagcagctccgcctggcgaggcagctggaagggctgtgggcaaggctgggcttgggcaccagggaggatgtaactccaaaatcagactctgaagctcaaggagaaggggaaaggctctttgacctggaggagacgctgggcagacaccgccggatcctgcaggctctgcggggtctctccaagcagctggcccaggctgagagacaatggaagaagcagctggggcccccaggccaagccaggcctgacggaggctgggccctggatgcttcctgccagattccatccaccccagggaggggtggccacctctccatgtcactcaataaggactctgccaaggtcggtgccctgctccatggacagtggactctgctccaggccctgcaagagatgagggatgcagctgtccgcatggctgcagaagcccaggtctcctacctgcctgtgggcattgagcatcatttcttagagctggaccacatcctgggcctcctgcaggaggagcttcggggcccggcgaaggcagcagccaaggccccccgcccacctggccagcccccaagggcctcctcgtgcctgcagcctggcatcttcctgttctacctcctcattcagactgtaggcttcttcggctacgtgcacttcaggcaggagctgaacaagagccttcaggagtgtctgtccacaggcagccttcctctgggtcctgcaccacacacccccagggccctggggattctgaggaggcagcctctccctgccagcatgcctgcctgacccacctcagagcctgctttgcatcactgggaagcaggcagtgtcttgggtgggggcttggtcagtatcctctccgtctgggtgcccagctcccacgcacacctgagctttcggcatgctcccacctcgttaaaggtgatttccctctcaaaaaaaaaaaaaaaaaaaaaaaaaaaaaaaaa

SEQ ID NO: 2156 - protein, 526 aa, Homo sapien
MPAVSGPGPLFCLLLLLLDPHSPETGCPPLRRFEYKLSFKGPRLALPGAGIPFWSHHGDAILGLEEVRLTPSMRNRSGAVWSRASVPFSAWEVEVQMRVTGLGRRGAHGMAVWYTRGRGHVGSVLGGLASWDGIGIFFDSPAEDTQDSPAIRVLASDGHIPSEQPGDGASQGLGSCHWDFRNRPHPFRARITYWGQRLRMSLNSGLTPSDPGEFCVDVGPLLLVPGGFFGVSAATGTLADDHDVLSFLTFSLSEPSPEVPPQPFLEMQQLRLARQLEGLWARLGLGTREDVTPKSDSEAQGEGERLFDLEETLGRHRRILQALRGLSKQLAQAERQWKKQLGPPGQARPDGGWALDASCQIPSTPGRGGHLSMSLNKDSAKVGALLHGQWTLLQALQEMRDAAVRMAAEAQVSYLPVGIEHHFLELDHILGLLQEELRGPAKAAAKAPRPPGQPPRASSCLQPGIFLFYLLIQTVGFFGYVHFRQELNKSLQECLSTGSLPLGPAPHTPRALGILRRQPLPASMPA

SEQ ID NO: 2157 - DNA, 1597 bp, Homo sapien
aacaaactgcacccactgaactccgcagctagcatccaaatcagcccttgagatttgaggccttggagactcaggagttttgagagcaaaatgacaacacccagaaattcagtaaatgggactttcctggcagagccaatgaaaggccctattgctatgcaatctggtccaaaaccactcttcaggaggatgtcttcactggtgggccccacgcaaagcttcttcatgagggaatctaagactttgggggctgtccagattatgaatgggctcttccacattgccctggggggtcttctgatgatcccagcagggatctatgcacccatctgtgtgactgtgtggtaccctctctggggaggcattatgtatattatttccggatcactcctggcagcaacggagaaaaactccaggaagtgtttggtcaaaggaaaaatgataatgaattcattgagcctctttgctgccatttctggaatgattctttcaatcatggacatacttaatattaaaatttcccattttttaaaaatggagagtctgaattttattagagctcacacaccatatattaacatatacaactgtgaaccagctaatccctctgagaaaaactccccatctacccaatactgttacagcatacaatctctgttcttgggcattttgtcagtgatgctgatctttgccttcttccaggaacttgtaatagctggcatcgttgagaatgaatggaaaagaacgtgctccagacccaaatctaacatagttctcctgtcagcagaagaaaaaaaagaacagactattgaaataaaagaagaagtggttgggctaactgaaacatcttcccaaccaaagaatgaagaagacattgaaattattccaatccaagaagaggaagaagaagaaacagagacgaactttccagaacctccccaagatcaggaatcctcaccaatagaaaatgacagctctccttaagtgatttcttctgttttctgtttccttttttaaacattagtgttcatagcttccaagagacatgctgactttcatttcttgaggtactctgcacatacgcaccacatctctatctggcctttgcatggagtgaccatagctccttctctcttacattgaatgtagagaatgtagccattgtagcagcttgtgttgtcacgcttcttcttttgagcaactttcttacactgaagaaaggcagaatgagtgcttcagaatgtgatttcctactaacctgttccttggataggctttttagtatagtatttttttttgtcattttctccatcagcaaccagggagactgcacctgatggaaaagatatatgactgcttcatgacattcctaaactatcttttttttattccacatctacgtttttggtggagtcccttttgcatcattgttttaaggatgataaaaaaaaaataacaactagggacaatacagaacccattccatttatctttctacagggctgacattgtggcacattcttagagttaccacaccccatgagggaagctctaaatagccaacacccatctgttttttgtaaaaacagcatagctt

SEQ ID NO: 2158 - protein, 297 aa, Homo sapien [sequence omitted]

SEQ ID NO: 2159 - DNA, 1324 bp, Homo sapien
cttgagaggctctggctcttgcttcttaggcggcccgaggacgccatggccgagtgcccgacactcggggaggcagtcaccgaccacccggaccgcctgtgggcctgggagaagttcgtgtatttggacgagaagcagcacgcctggctgcccttaaccatcgagataaaggataggttacagttacgggtgctcttgcgtcgggaagacgtcgtcctggggaggcctatgacccccacccagataggcccaagcctgctgcctatcatgtggcagctctaccctgatggacgataccgatcctcagactccagtttctggcgcttagtgtaccacatcaagattgacggcgtggaggacatgcttctcgagctgctgccagatgactgatgtatggtcttggcagcacctgtctcctttcaccccagggcctgagcctggccagcctacaatggggatgttgtgtttctgttcaccttcgtttactatgcctgtgtcttctccaccacgctggggtctgggaggaatggacagacagaggatgagctctacccagggcctgcaggacctgcctgtagcccactctgctcgccttagcactaccactcctgccaaggaggattccatttggcagagcttcttccaggtgcccagctatacctgtgcctcggcttttctcagctggatgatggtcttcagcctctttctgtcccttctgtccctcacagcactagtatttcatgttgcacacccactcagctccgtgaacttgtgagaacacagccgattcacctgagcaggacctctgaaaccctggaccagtggtctcacatggtgctacgcctgcatgtaaacacgcctgcaaacgctgcctgccggtaaacacgcctgcaaacgctgcctgcccgtaaacacgcctgcaaacgctgcctgcccacacaggttcacgtgcagctcaaggaaaggcctgaaaggagcccttatctgtgctcaggactcagaagcctctgggtcagtggtccacatcccgggacgcagcaggaggccaggccggcgagccctgtggatgagccctcagaacccttggcttgcccacgtggaaaagggatagaggttgggtttcccccctttatagatggtcacgcacctgggtgttacaaagttgtatgtggcatgaatactttttgtaatgattgattaaatgcaagatagtttatctaacttcgtgcgcaatcagcttctatccttgacttagattctggtggagagaagtgagaataggcagcccccaaataaaaaatattcatggaaaaaaaaaaaaaaa

SEQ ID NO: 2160 - protein, 114 aa, Homo sapien
MAECPTLGEAVTDHPDRLWAWEKFVYLDEKQHAWLPLTIEIKDRLQLRVLLRREDVVLGRPMTPTQIGPSLLPIMWQLYPDGRYRSSDSSFWRLVYHIKIDGVEDMLLELLPDD

SEQ ID NO: 2161 - DNA, 4188 bp, Homo sapien
ggcactgtgttaccagcagagagacagggcaagcagaatgtgcctgtatggacctttgcaaacgtcactacaaacctgtgtgtggatctgacggagaattctatgaaaaccactgtgaagtgcaccgagctgcttgcctgaaaaaacaaaagattaccattgttcacaatgaagactgcttctttaaaggagataagtgcaagactactgaatgcagcaagatgaaaaatatgctattagatttacaaaatcaaagatatattatgcaagaaaatgaaaatcctaatggcgacgacatatctcggaagaagctattggtggatcaaatgtttaaatattttgatgcagacagtaatgacttgtagatattaatgaactaactcaggtgataaaacaggaagaacttggcaaggatctctttgattgtactttgtatgttctattgaaatatgatgattttaatgctgacaagcacctggctcttgaagaattttatagagcattccaagtgatccagttgagtctgccagaagatcagaaactaagcatcactgcagcaactgtgggacaaagtgctgttctgagctgtgccattcaaggaaccctgagacctcccattatctggaaaaggaacaatattattctaaataatttaggtttggaagacatcaatgactttggagatgatgggtccttgtatattactaaggttaccacaactcacgttggcaattacacctgctatgcagatggctatgaacaagtctatcagactcacatcttccaagtgaatgttcctccagtcatccgggtgtatccagagagtcaggctagagagcctggggtaactgccagtcttaggtgccatgcagagggcataccaaagcctcagcttggctggttgaagaatggaattgatattacaccaaagctttccaaacaactcacgcttcaagcaaatggcagtgaggttcacataagcaatgtgcgctatgaagatactggagcatacacttgtatcgcaaagaatgaagcaggagtggatgaagacatctcttctctttttgtggaagactctgctagaaagaccctagctaacatattatggagagaagaaggtctgggaattgggaacatgttctatgttttttatgaagatggaatcaaagtgatacaacccatagaatgtgaatttcagaggcacattaagcctagtgaaaagctccttggatttcaggatgaagtctgtcccatagctgagggagatgaagttcagaggtgtgtgtgggcatcagctgttaatgtcaaagacaagttcatttatgttgcacagccaactttggacagagtccttattgttgatgtgcagtcccaaaaagttgttcaggcagtgagcacagaccctgtcccagttaaattacactatgacaaatcacatgatcaggtctgggtgctaagctggggtaccttggagaagacatcaccaacactacaggtaattaccctggccagtgggaatgtgcctcaccacacgatccacacccaaccagtgggaaagcaatttgacagagtggatgattttttcattcccaccacaacactcattatcacccatatgaggtttggatttattcttcataaagatgaagctgcactacaaaaaattgatcttgaaaccatgtcatacatcaagacaattaacttgaaggactataagtgcgttcctcagtcattggcatatacacacttgggaggctactacttcattggctgcaaacctgacagcaccggagcagtttccccacaggtcatggtggacggtgtaactgactcagtcattgggttcaatagtgatgtgacgggcactccatatgtctctccagatggccactaccttgtcagcattaatgatgtgaaaggtcttgtaagggttcagtacattaccatcagaggagaaatacaggaggcttttgatatttacacaaatctgcacatatctgatctggcatttcaaccatcctttactgaagcccaccaatataacatctacggtagttcaagcacacaaactgatgtgctctttgtggagctctcttctgggaaggtcaagatgataaagagtctcaaggaaccactcaaggcagaagaatggccttggaacaggaaaaacaggcaaatccaggacagtggcttgtttggtcaatacctgatgacaccttccaaggactctctcttcatcctagatggacgactcaataaattaaactgtgagatcactgaagttgaaaaaggaaatacagtcatttgggttggagatgcctaaaaaccctacgatacaattattgaatgaagcgttttacaatacattgcacttaatccattgtttaaatttacaacttaactttccaagtttatatcctagtcaaacaaaatttacttggttggtccaaataaaataaattgtttttgactaagtgactaagacatacacaattaattatattggttaattagaaatactcagcacaatatttaatgagaaatcacatcagtcacaagaatcaaatatgtaaattatgctttaaacaataaagtaggatttaaatcatttaaaaaactaaactgcagggaatttcagatgacataaagcattatttcattttgagggtagtttattctttttctctgtccttttggtatgattaaacaagaaatacaaggtgttgtggaaacttaaaattcttaattcaaaatattcggtcctgtccactgtttataatattttgtgccttgaagggaatgtcacaggaggaaaaggaagactaaagcctgcatactaaatgctctcataactataaatctcttgttgttaaaaaacatctcttgcaccaaatcctgtcttcagccttttgtttaaccctcaatgaactaccaattgaaggcataagttggtcttaggttgtatacaggtgtcaaactccacttgacatttactgtgtaatctgcagcatgctatagaaagtggggaggaagggaggaaaaataattacagtcaaaatatttgcaatctgtctactcattttgctttcaatcactagagtgcattatgtttttaatgcaagtttgtctgggatgtcaactgcctacagatgtttattactagcagaatagattatttattaatagattgtttcttttcatatagtccaatgtttcatcatcaggaactttcggttttaaaaaagaaacattacttttgtctgctaaagtaaaccatatatagggaaattaacacctaggaaaagaaaactggcaagtgaattgatgaggtattagtggcttagaagaattagtaatataagttgggaataaaggggtagcccgacagtggtaagtaaaaatgtagtactccattgtttttgctatttaaatataatgtatcaaaaacctttattctaaaatttccacaaatgattccttttatccatcttcttgtaatcctaaaagcatcttctcactatgtgctgcagtttgaaacctaacgaatcctcctacttgagacactgtagaaaagtaaaaattgttgcttctgttttgttttaagaggaaatgagaaggccagcagaagtagattaaaactagagagctggtttattaaaataagcagataattatccaggcttaaagtaatagcttacatgttttgaaaatccttgtacttatttttgtttttattgttgcaaaaaaatgttaatgggctgttgaaatgacctccatttacttaaggtaatccaataaggtcttttttaaatatacaaattttactcaagtttaaattgtataaaactgcttagaaacctgaaattttatagtgtgtaatatcttatgtgtatatagcatcctgagctgtgtgatacagtagatttcttcttagcagaaacatgcgaggtagacttaataaacaacaaaaatcagcttatgtttctacttattgaatctgctttactttttagcaattttcttccttgtgaacatgaaccatataaagtgtctgtgacttaatgatttcatgtaagtctgtcgcatacatccttcttttgtagcttacaccatgtggatgctctgtctgtagacactgcttgataaaaggagaataaacctcttacattttaaaaaaaaaaaaaaaaa

SEQ ID NO: 2162 - DNA, 1727 bp, Homo sapien
ggatttttaaaaatgagtgacaccacatggttctcttcaaagatgtaaactgctagggtgtttggatgcaagctgaaatcacctttaagaagcccatgcctaccaaggtggttttcatgagcctatgcaaaagtttctgggactgtgggcttgtagccctggatgacattacaatacaattgggaagctgctcatcttcagagaaacttccacctccacctggagagtgtactttcgagcaagatgaatgtacatttactcaggagaaaagaaaccggagcagctggcacaggaggaggggagaaactcccacttcctacacaggaccaaagggagatcacactactggggtaggctactacatgtacattgaggcctcccatatggtgtatggacaaaaagcacgcctcttgtccaggcctctgcgaggagtctctggaaaacactgcttgacctttttctaccacatgtatggagggggcactggcctgctgagtgtttatctgaaaaaggaagaagacagtgaagagtccctcttatggaggagaagaggtgaacagagcatttcctggctacgagcactgattgaatacagctgtgagaggcaacaccagataatttttgaagccattcgaggagtatcaataagaagtgatattgccattgatgatgttaaatttcaggcaggaccctgtggagaaatggaagatacaactcaacaatcatcaggatattctgaggacttaaatgaaattgagtattaagaaatgatctgcattggatttactagacgaaaaccatacctctcttcaatcaaaatgaaaacaaagcaaatgaatactggacagtcttaacaattttataagttataaaatgactttagagcaccctccttcattacttttgcaaaaacatactgactcagggctctttttttctttttgcatatgacaactgttactagaaatacaggctactggttttgcatagatcattcatcttaattttggtaccagttaaaaatacaaatgtactatattgtagtcattttaaagtacacaaagggcacaatcaaaatgagatgcactcatttaaatctgcattcagtgaatgtattgggagaaaaataggtcttgcaggtttccttttgaattttaagtatcataaatattttttaagtaaataatacggggtgtcagtaatatctgcagaatgaatgcagtctttcatgctaatgagttagtctggaaaaataaagtcttattttctatgttttattcatagaaatggagtattaatttttaatattttcaccatatgtgataacaaaggatctttcatgaatgtccaagggtaagtcagtattaattaatgctgtattacaaggcaatgctaccttctttattccccctttgaactacctttgaagtcactatgagcacatggatagaaatttaacttttttttgtaaagcaagcttaaaatgtttatgtatacatacccagcaacttttataaatgtgttaaacaattttactgatttttataataaatattttggtaagattttgaataatatgaattcaggcagatatactaaactgcttttatttacttgtttagaaaattgtatatatatgtttgtgtatcctaacagctgctatgaaattataaaattacctaataaaaataatttgaaaatcttaaaaaaaaaaaaaaaaaaaaaaa

SEQ ID NO: 2163 - protein, 232 aa, Homo sapien
MQAEITFKKPMPTKVVFMSLCKSFWDCGLVALDDITIQLGSCSSSEKLPPPPGECTFEQDECTFTQEKRNRSSWHRRRGETPTSYTGPKGDHTTGVGYYMYIEASHMVYGQKARLLSRPLRGVSGKHCLTFFYHMYGGGTGLLSVYLKKEEDSEESLLWRRRGEQSISWLRALIEYSCERQHQIIFEAIRGVSIRSDIAIDDVKFQAGPCGEMEDTTQQSSGYSEDLNEIEY

SEQ ID NO: 2164 - DNA, 1818 bp, Homo sapien
tggtggccggaggcattaccatcctacaccccttcatggctgcctccaggcccttcttcagggacatcgttttctacatggtggctgtgttcctgaccttcctcatgctcttccgtggcagggtcaccctggcatgggctctgggttacctgggcttgtatgtgttctatgtggtcactgtgattctctgcacctggatctaccaacggcaacggagaggatctctgttctgccccatgccagttactccagagatcctctcagactccgaggaggaccgggtatcttctaataccaacagctatgactacggtgatgagtaccggccgctgttcttctaccaggagaccacggctcagatcctggtccgggccctcaatcccctggattacatgaagtggagaaggaaatcagcatactggaaagccctcaaggtgttcaagctgcctgtggagttcctgctgctcctcacagtccccgtcgtggacccggacaaggatgaccagaactggaaacggcccctcaactgtctgcatctggttatcagccccctggttgtggtcctgaccctgcagtcggggacctatggtgtctatgagataggcggcctcgttcccgtctgggtcgtggtggtgatcgcaggcacagccttggcttcagtgaccttttttgccacatctgacagccagccccccaggcttcactggctctttgctttcctgggctttctgaccagcgccctgtggatcaacgcggccgccacagaggtggtgaacatcttgcggtccctgggtgtggtcttccggctgagcaacactgtgctggggctcacgctgctggcctgggggaacagcattggagatgccttctcggatttcacactggctcgccagggctacccacggatggcgttctccgcctgctttggcggcatcatcttcaacatcctcgtgggtgtggggctgggctgcctgctccagatctcccgaagccacacagaagtgaagctggagccagacggactgctggtgtgggtcctggcaggcgccctggggctcagcctcgtcttctccctggtctcagtcccattgcagtgcttccagctcagcagagtctatggcttctgcctgctcctcttctacctgaacttccttgtcgtggccctcctcactgaatttggagtgattcacctgaaaagcatgtgactgaagccgcttagtgctgtggcctcactgcaggcaggagccccgcccctcctgccgggggaggcccagggaccggagcatttctgcaaggcccttgtgggcacgagagtgcggcccttgctgctggagatctgaggtcactgctgtgagctgggagaactgctgtgtacctcttgctgccagcacccaacagccttgccgtggggaccttggaaacctggctttgctctggacaaagggttccagagagaagctagaagtcccccttgaatgacccccagagcccctctgagaagggctggagtttgggggaaggggatggctggatgtgctccaggccatgctggaggtacccccgaggcacaggcactgcccgttccccttgcctgggcttcaggccttctggcaccttctcaggacacaagtggctgcccaaccctgactcagagaatgagggtggcttggacccctgggaatcaggccgccgagggctgagctccagagccgcaccatctgccacaaacagaattcgagacatacttaattttgaatttctccttgccacgttaataaagccaaaagcagcgggtgctaaaaaaaaaaaaaaaaaaaa

SEQ ID NO: 2165 - protein, 389 aa, Homo sapien
MAASRPFFRDIVFYMVAVFLTFLMLFRGRVTLAWALGYLGLYVFYVVTVILCTWIYQRQRRGSLFCPMPVTPEILSDSEEDRVSSNTNSYDYGDEYRPLFFYQETTAQILVRALNPLDYMKWRRKSAYWKALKVFKLPVEFLLLLTVPVVDPDKDDQNWKRPLNCLHLVISPLVVVLTLQSGTYGVYEIGGLVPVWVVVVIAGTALASVTFFATSDSQPPRLHWLFAFLGFLTSALWINAAATEVVNILRSLGVVFRLSNTVLGLTLLAWGNSIGDAFSDFTLARQGYPRMAFSACFGGIIFNILVGVGLGCLLQISRSHTEVKLEPDGLLVWVLAGALGLSLVFSLVSVPLQCFQLSRVYGFCLLLFYLNFLVVALLTEFGVIHLKSM

SEQ ID NO: 2166 - DNA, 3828 bp, Homo sapien
aagacaacgtcactagcagtttctggagctacttgccaaggctgagtgtgagctgagcctgccccaccaccaagatgatcctgagcttgctgttcagccttgggggccccctgggctgggggctgctgggggcatgggcccaggcttccagtactagcctctctgatctgcagagctccaggacacctggggtctggaaggcagaggctgaggacaccagcaaggaccccgttggacgtaactggtgcccctacccaatgtccaagctggtcaccttactagctctttgcaaaacagagaaattcctcatccactcgcagcagccgtgtccgcagggagctccagactgccagaaagtcaaagtcatgtaccgcatggcccacaagccagtgtaccaggtcaagcagaaggtgctgacctctttggcctggaggtgctgccctggctacacgggccccaactgcgagcaccacgattccatggcaatccctgagcctgcagatcctggtgacagccaccaggaacctcaggatggaccagtcagcttcaaacctggccaccttgctgcagtgatcaatgaggttgaggtgcaacaggaacagcaggaacatctgctgggagatctccagaatgatgtgcaccgggtggcagacagcctgccaggcctgtggaaagccctgcctggtaacctcacagctgcagtgatggaagcaaatcaaacagggcacgagttccctgatagatccttggagcaggtgctgctaccccacgtggacaccttcctacaagtgcatttcagccccatctggaggagctttaaccaaagcctgcacagccttacccaggccataagaaacctgtctcttgacgtggaggccaaccgccaggccatctccagagtccaggacagtgccgtggccagggctgacttccaggagcttggtgccaaatttgaggccaaggtccaggagaacactcagagagtgggtcagctgcgacaggacgtggaggaccgcctgcacgcccagcactttaccctgcaccgctcgatctcagagctccaagccgatgtggacaccaaattgaagaggctgcacaaggctcaggaggccccagggaccaatggcagtctggtgttggcaacgcctggggctggggcaaggcctgagccggacagcctgcaggccaggctgggccagctgcagaggaacctctcagagctgcacatgaccacggcccgcagggaggaggagttgcagtacaccctggaggacatgagggccaccctgacccggcacgtggatgagatcaaggaactgtactccgaatcggacgagactttcgatcagattagcaaggtggagcggcaggtggaggagctgcaggtgaaccacacggcgctccgtgagctgcgcgtgatcctgatggagaagtctctgatcatggaggagaacaaggaggaggtggagcggcagctcctggagctcaacctcacgctgcagcacctgcagggtggccatgccgacctcatcaagtacgtgaaggactgcaattgccagaagctctatttagacctggacgtcatccgggagggccagagggacgccacgcgtgccctggaggagacccaggtgagcctggacgagcggcggcagctggacggctcctccctgcaggccctgcagaacgccgtggacgccgtgtcgctggccgtggacgcgcacaaagcggagggcgagcgggcgcgggcggccacgtcgcggctccggagccaagtgcaggcgctggatgacgaggtgggcgcgctgaaggcggccgcggccgaggcccgccacgaggtgcgccagctgcacagcgccttcgccgccctgctggaggacgcgctgcggcacgaggcggtgctggccgcgctcttcggggaggaggtgctggaggagatgtctgagcagacgccgggaccgctgcccctgagctacgagcagatccgcgtggccctgcaggacgccgctagcgggctgcaggagcaggcgctcggctgggacgagctggccgcccgagtgacggccctggagcaggcctcggagcccccgcggccggcagagcacctggagcccagccacgacgcgggccgcgaggaggccgccaccaccgccctggccgggctggcgcgggagctccagagcctgagcaacgacgtcaagaatgtcgggcggtgctgcgaggccgaggccggggccggggccgcctccctcaacgcctcccttgacggcctccacaacgcactcttcgccactcagcgcagcttggagcagcaccagcggctcttccacagcctctttgggaacttccaagggctcatggaagccaacgtcagcctggacctggggaagctgcagaccatgctgagcaggaaagggaagaagcagcagaaagacctggaagctccccggaagagggacaagaaggaagcggagcctttggtggacatacgggtcacagggcctgtgccaggtgccttgggcgcggcgctctgggaggcaggatcccctgtggccttctatgccagcttttcagaagggacggctgccctgcagacagtgaagttcaacaccacatacatcaacattggcagcagctacttccctgaacatggctacttccgagcccctgagcgtggtgtctacctgtttgcagtgagcgttgaatttggcccagggccaggcaccgggcagctggtgtttggaggtcaccatcggactccagtctgtaccactgggcaggggagtggaagcacagcaacggtctttgccatggctgagctgcagaagggtgagcgagtatggtttgagttaacccagggatcaataacaaagagaagcctgtcgggcactgcatttgggggcttcctgatgtttaagacctgaaccccagccccaatctgatcagacatcatggactcgcccagctctcctcggcctggggctctggccaaggatgggctggaggtcattcagttggtctgtctcttccctggaaaccttctgcaaagatggtgtggtgtacgtggcttccctgtaaccacatggggcttggccatttctccatgatgagaaggactggaatgcttctccgggcaggacatggtcctaggaagcctgaaccttggcttggcatgccttctcagacagcacggcctgggctccaactcttcaccacaccctgtattctacaacttctttggtgttttgctcctcctgtggttggaaacttctgtacaacactttaaacttttctcttgcttcctcttctcttctcccttatcgtatgatagaaagacattcttccccaggaggaatgtttaaaatggaggcaacattttggccaacattggaaagcactagagggcaatgggattaaaccaacctgcttggtctctattagtcagtaatgaagacgacagcctggccaaccaagggaaaggaaattagtatctttagtttcagtcattccttgtaggatatggtttagctgtgcccccacctaaaatatcatcttgaattgtaatccctataatccccacatcaagggagagatcaggtggaggtaattggatcttgggggcggttcccccatgctgttcttgtgatagttctcacgagatctgatgattttataagtttgatagttcctcctgtgttcattctccttcctgccaccttgtgaagatgccttggttcctcttcactgtctgccatgattgtaagtttcctgaggcctccccagccatgtggaacagtgagtcaattaaacctctttcctttataaatt

SEQ ID NO: 2167 - protein, 949 aa, Homo sapien
MILSLLFSLGGPLGWGLLGAWAQASSTSLSDLQSSRTPGVWKAEAEDTSKDPVGRNWCPYPMSKLVTLLALCKTEKFLIHSQQPCPQGAPDCQKVKVMYRMAHKPVYQVKQKVLTSLAWRCCPGYTGPNCEHHDSMAIPEPADPGDSHQEPQDGPVSFKPGHLAAVINEVEVQQEQQEHLLGDLQNDVHRVADSLPGLWKALPGNLTAAVMEANQTGHEFPDRSLEQVLLPHVDTFLQVHFSPIWRSFNQSLHSLTQAIRNLSLDVEANRQAISRVQDSAVARADFQELGAKFEAKVQENTQRVGQLRQDVEDRLHAQHFTLHRSISELQADVDTKLKRLHKAQEAPGTNGSLVLATPGAGARPEPDSLQARLGQLQRNLSELHMTTARREEELQYTLEDMRATLTRHVDEIKELYSESDETFDQISKVERQVEELQVNHTALRELRVILMEKSLIMEENKEEVERQLLELNLTLQHLQGGHADLIKYVKDCNCQKLYLDLDVIREGQRDATRALEETQVSLDERRQLDGSSLQALQNAVDAVSLAVDAHKAEGERARAATSRLRSQVQALDDEVGALKAAAAEARHEVRQLHSAFAALLEDALRHEAVLAALFGEEVLEEMSEQTPGPLPLSYEQIRVALQDAASGLQEQALGWDELAARVTALEQASEPPRPAEHLEPSHDAGREEAATTALAGLARELQSLSNDVKNVGRCCEAEAGAGAASLNASLDGLHNALFATQRSLEQHQRLFHSLFGNFQGLMEANVSLDLGKLQTMLSRKGKKQQKDLEAPRKRDKKEAEPLVDIRVTGPVPGALGAALWEAGSPVAFYASFSEGTAALQTVKFNTTYINIGSSYFPEHGYFRAPERGVYLFAVSVEFGPGPGTGQLVFGGHHRTPVCTTGQGSGSTATVFAMAELQKGERVWFELTQGSITKRSLSGTAFGGFLMFKT

SEQ ID NO: 2168 - DNA, 2889 bp, Homo sapien
cctgtctctcttcgggtctcgggcccttgggcgcagcggggcgcgcgccatggcgaaggcgaagaaggtcggggcgcgaaggaaggcctccggggcgccggcgggagcgcgagggggcccggcgaaggccaactccaatccgttcgaggtgaaagttaacaggcagaagttccagatcctgggccggaagacgcgccacgacgtgggactgcccggggtgtctcgcgcacgggccctcaggaagcgtacacagactttactaaaagagtacaaagaaagggataaatccaatgtattcagagataaacgcttcggagaatacaacagcaacatgagccccgaggagaagatgatgaagaggtttgctctggaacagcagcgacatcatgagaaaaaaagcatctacaatctaaatgaagatgaagaattgactcattatggccagtctttggcagacatcgagaagcataatgacattgtggacagtgacagcgatgctgaggatcgaggaacgttgtctgctgagctgactgctgcccactttggaggaggcggtgggctccttcacaagaagactcaacaggaaggcgaggagcgggagaaaccgaagtcccggaaagagctgattgaagagctcattgccaagtcaaaacaagagaagagggagagacaagctcaacgagaagatgccctcgagctcacggagaagctagaccaagactggaaagaaattcagactctcctgtcccacaaaactcccaagtcagagaacagagacaaaaaggaaaaacccaagcccgatgcatatgacatgatggttcgcgagcttggctttgaaatgaaggcgcagccctctaacaggatgaagacggaggcagaattggcaaaggaagagcaggagcacctcaggaagctggaggctgagagacttcgaagaatgcttggaaaggatgaggatgaaaatgttaagaaaccaaaacatatgtcagcagatgatctgaatgatggcttcgtgctagataaagatgacaggcgtttgctttcctacaaagatggaaagatgaatgtcgaggaagatgtccaggaagagcaaagcaaggaagccagtgaccctgagagcaacgaggaagaaggtgacagttcaggcggggaggacacagaggagagcgacagcccagatagccacttggacctggaatccaacgtggagagtgaggaagaaaacgagaagccagcaaaagagcagaggcagactcctgggaaagggttgataagcggcaaggaaagagctggaaaagctaccagagacgagctgccctacacgttcgcagcccctgaatcctatgaggaactgagatctctgttgttaggaagatcgatggaagagcagcttttggtggtggagagaattcagaagtgcaaccacccgagtctcgcagaaggaaacaaagcaaaattagaaaaactgtttggctttcttttggaatacgttggcgatttggctacagatgacccaccagacctcacagtcattgataagttggttgtgcacttatatcatctttgccagatgtttcctgaatctgcaagtgacgctatcaaatttgttctccgagatgcgatgcatgagatggaagaaatgattgagaccaaaggccgggcggcattgccagggttggatgtgctcatttatttgaaaatcactgggctgctatttccaacttccgacttctggcacccagtggtgacccctgccctcgtgtgcctcagtcagctgctcaccaagtgccccatcctgtccctccaggacgtggtgaagggcctgttcgtgtgctgcctgttcctggagtatgtggctttgtcccagaggtttatacctgagcttattaattttcttcttgggattctttacatagcaactccaaacaaagcaagccaaggttccactctggtgcaccctttcagagcgcttgggaagaactcggaactgctcgtggtgtctgctagagaggatgtggccacgtggcagcagagcagcctctccctccgctgggcgagtagactgagggccccaacttcgacagaggccaatcacatccgactgtcctgcctggctgtgggcctggccctgctgaagcgctgcgtgctcatgtacgggtccctgccatccttccacgccatcatggggcctctccaagccctcctcacggatcacctggcggactgcagccacccgcaggagctccaggagctgtgtcagagcacactgaccgaaatggaaagccagaagcagctctgccggccgctgacctgtgagaagagcaagcctgtcccactgaagcttttcacaccccggctggtcaaagtcctcgagtttggaagaaaacaaggcagtagtaaggaggaacaggaaaggaagaggctgatccacaaacacaagcgtgaatttaaaggggccgttcgagaaatccgcaaggacaatcagttcctggcgaggatgcaactctcagaaatcatggaacgggatgcggaaagaaagcggaaagtaaagcagctttttaacagcctggctacacaggaaggcgaatggaaggctctgaagaggaaaaagttcaaaaaataaattacattttataaataagctccccccacccgctgcctgcggttttgtttctgttaaaacgtcacctgatgaaatagaatgaatcctgaaatgcacctctgggatcgggaatggtctgtgtgttatcagctgcgactggttcactgcgtctggacaagcctcatggggactggggattctggccagtgtaatttctgtcaaccacggacgtttgccttcatgtgtagaatttactgttgttatgcaaattatattttcaattataa

SEQ ID NO: 2169 - DNA, 1418 bp, Homo sapien
agaagaagctggccaaggatatgggagcaaccaccatggaccagaagtctctctgggcaggtgtagtggtcttgctgcttctccagggaggatctgcctacaaactggtttgctactttaccaactggtcccaggaccggcaggaaccaggaaaattcacccctgagaatattgaccccttcctatgctctcatctcatctattcattcgccagcatcgaaaacaacaaggttatcatcaaggacaagagtgaagtgatgctctaccagaccatcaacagtctcaaaaccaagaatcccaaactgaaaattctcttgtccattggagggtacctgtttggttccaaagggttccaccctatggtggattcttctacatcacgcttggaattcattaactccataatcctgtttctgaggaaccataactttgatggactggatgtaagctggatctacccagatcagaaagaaaacactcatttcactgtgctgattcatgagttagcagaagcctttcagaaggacttcacaaaatccaccaaggaaaggcttctcttgactgcgggcgtatctgcagggaggcaaatgattgataacagctatcaagttgagaaactggcaaaagatctggatttcatcaacctcctgtcctttgacttccatgggtcttgggaaaagccccttatcactggccacaacagccctctgagcaaggggtggcaggacagagggccaagctcctactacaatgtggaatatgctgtggggtactggatacataagggaatgccatcagagaaggtggtcatgggcatccccacatatgggcactccttcacactggcctctgcagaaaccaccgtgggggcccctgcctctggccctggagctgctggacccatcacagagtcttcaggcttcctggcctattatgagatctgccagttcctgaaaggagccaagatcacgcgcctccaggatcagcaggttccctacgcagtcaaggggaaccagtgggtgggctatgatgatgtgaagagtatggagaccaaggttcagttcttaaagaatttaaacctgggaggagccatgatctggtctattgacatggatgacttcactggcaaatcctgcaaccagggcccttaccctcttgtccaagcagtcaagagaagccttggctccttgtgaaggattaacttacagagaagcaggcaagatgaccttgctgcctggggcctgctctctcccaggaattctcatgtgggattccccttgccaggctggcctttggatctctcttccaagcctttcctgacttcctcttagatcatagattggacctggttttgttttcctgcagctgttgacttgttgccctgaagtacaataaaaaaaattcattttgctccagta

SEQ ID NO: 2170 - protein, 385 aa, Homo sapien
MDQKSLWAGVVVLLLLQGGSAYKLVCYFTNWSQDRQEPGKFTPENIDPFLCSHLIYSFASIENNKVIIKDKSEVMLYQTINSLKTKNPKLKILLSIGGYLFGSKGFHPMVDSSTSRLEFINSIILFLRNHNFDGLDVSWIYPDQKENTHFTVLIHELAEAFQKDFTKSTKERLLLTAGVSAGRQMIDNSYQVEKLAKDLDFINLLSFDFHGSWEKPLITGHNSPLSKGWQDRGPSSYYNVEYAVGYWIHKGMPSEKVVMGIPTYGHSFTLASAETTVGAPASGPGAAGPITESSGFLAYYEICQFLKGAKITRLQDQQVPYAVKGNQWVGYDDVKSMETKVQFLKNLNLGGAMIWSIDMDDFTGKSCNQGPYPLVQAVKRSLGSL

SEQ ID NO: 2171 - DNA, 4270 bp, Homo sapien
agagtcctggatgagacggctcgagagcgtgcccggctgcagatagagattgggaagctgagggcagagttggacgaggtcaacaagagcgccaagaagagggagggcgagcttacggtggcccagggccgtgtgaaggacctggagtccctgttccaccggagcgaggtggagctggcagctgccctcagcgacaagcgcggcctggagagtgacgtggctgagctgcgggcccagctggccaaggccgaggacggtcatgcagtggccaaaaagcagctggagaaggagacgctgatgcgtgtggacctggagaaccgctgccagagcctgcaggaggagctggacttccggaagagtgtgttcgaggaggaggtgcgggagacgcggcggcggcacgagcggcgcctggtggaggtggacagcagccggcagcaggagtacgacttcaagatggcacaggcgctggaggagctgcggagccagcacgacgagcaagtgcggctctacaagctggagctggagcagacctaccaggccaagctggacagcgccaagctgagctctgaccagaacgacaaggcggccagtgcggctcgcgaggagctgaaggaggcccgcatgcgcctggagtccctcagctaccagctctccggcctccagaagcaggccagtgccgctgaagatcgcattcgggagctggaggaggccatggccggggagcgggacaagttccggaagatgctggacgccaaggagcaggagatgacggagatgcgggacgtgatgcagcagcagctggccgagtaccaggagctgctggacgtgaagctggccctggacatggagatcaacgcctaccggaagctcctggagggcgaggaggagagcctgaagctgtcccccagcccatcttcgcgcgtcaccgtctcacgagccacctcgagcagcagcggcagcttgtccgccaccgggcgcctgggccgcagtaagcggaagcgctggaggtggaggagcccttggcagcggcccaagcgtcctgggcacgggcacgggtggcagcggtggcttccacctggcccagcaggcctcggcctcgggcagcgtcacatcgaggagatcgacctggagggcaagtttgtgcagctcaagaacaactcggacaaggatcagtctctggggaactggagaatcaagaggcaggtcttggagggggaggagatcgcctacaagttcacgcccaagtacatcctgcgggccggccagatggtcacggtgtgggcagctggtgcgggggtggcccacagccccccctcgacgctggtgtggaagggccagagcagctggggcacgggcgagagcttccgcaccgtcctggttaacgcggatggcgaggaagtggccatgaggactgtgaagaagtcctcggtgatgcgtgagaatgagaatggggaggaagaggaggaggaagccgagtttggcgaggaggatcttttccaccaacagggggacccgaggaccacctcaagaggctgctacgtgatgtgaacccacactcctcatccacacacctttctttacccagagccactgaaaactattttttatcattggctttctttagttcttgatacatttctagagaatttctaagcgaactgccagaacgtgtgggtgggtctcccccagccctccctcctggcgggtctcctccagcctcacttcgctgccacttcgccgctgccccggagacttttcaatcccaccccactcctcatctcaccatttggtcaaattggaagcccagggccaggacccggaggtttagaagatgcttgggcttggagggaggagggccggcgaggctagcgaggggacaggagacggccctgctgcggacggagcgcggaaactgcgtaggaattcagtggtggtgggtttttttaaggctttctacaaaaccaaattcagaatccaggcgtcgacctggtggggcccggggcaagcctgcattctggctgcccagcttcggacagcgggaactcctcaggcagccacgcagcgggtgtgggccagcatggggatggcgtggccccaggggggttttcactccgctgcctgggcttccagattcccgttctggcagcgaccggccgggtttctcggaccgttgactttatttgggggagttttcccgcagttcagttcctgactgtgcaaggccaacagggcaggggaggggaagacctggggaaggaagaatgaggacacagtcccgtcgtaagacctgtcacaacaataagcagggaggggagatgtggaggggacacatctggttgccttggaggcagaagctgtgagtttcagaacagctgtctgcagggaacgccaccatgttgaccctctggaggagagcgctgtggagcccctcccgtgttccagctccgtctgccctgtgcctatatatcacatgcgtctatcatactgtgtctttatctgtgatttttctcgctgaaacatgtttctcagacagccaaggccacctgactcctatcacgacgcacccaagcccctcagtccagcttcccaatgcctggcacccccttcggcaatagctcaccgtttacaccctccctcatagatacacagaagttatttttttaatggatatttatttttttacattggtcagtacacaggtcagggagctcacgccagggccttgaggacaggctgaccctcctccccggggtggcgtggggctggggcacccccgacggcagagcctccttcagaaagtgcagctcaagtcttaaagacaccaaaactgagccatgggcacgcgccgtctccgggccatggcgttcactgcagggcgggggcggcaccgctcccctgtgactgcatcccgcctccctggggacctgcctgtggcaggaaggaatggggggccccagcccaggccgggaaggagccagcggccgacaaagcagaaacaccgctgctccacgtagcccctgctggctgtccttgctctcagaagtcccggtcccatgtagatagagcccggcggatcttaccaaagcatttcctcctggaggctacgccgcttggtgctcccagtgaggcggctggtagggagctttgcctgccccggggataccctctaccagccgctggaagtgggaatgctggcgacagactgtgtctgtttcccaccttcatagcaggaatcacccggacccgactggctgggcttcgtgctagcgagggttttctgggggtgggtcttggtgatcttgtcctatggggatctctgcagtggtctcagccacatcctagtatattttggctctggaggagcaaagctgtatcctggagttggtctgtgatttgccgacagacttgcaggctgggctcagcaaagtcccccccaaaacccgcaggtcctcatgtccagacgctgccagtcctgtcctgaaaacagcacgccccaggcccacagaaccccccaccctacatttgccttgggtggagctgggggtggtcctaggactgcgggtgcccttagctgaagggggcccgcagaagcgtgagctgggccgcctgtgggtcattggaggttcattgagaattgagtcctttggaaagactaagaaaatcaaatttttaaaagttatttatggcctgggaaacaatttgcatttgtccccaaatacgcttagctgtgtgccgcttagaacgatgagaaaccatccctctgtgtaagcccgtgccgtgtgactcgaagcctagcgccctccctgcgaagcatcagacgccacccagccctgggggaggcccacgcctgctggaccaacgcgggttctggggtgcacagcgccaggttaacgctgaagcctgccccgctgagcccaagagccgggaggcctgcgggctgacccagaatccgatcatgcacctgtcctcatgccagcggctttggctggggttggtctgaagcctgcacgcggcagttctttgttaaagatctgagggactcgtcagtcctagcgtcgccgcctgcagcctcttccaagccctgcgtccagcgagcgtcacagcacaacctgcaaaaacggagctgggctgcagctggggctggcatggactttcatttcagagattcggtttttaagaagatgcatgcctagcgtgttcttttttttttccaatgatttgtaatatacattttatgactggaaacttttttgtacaacactccaataaa

SEQ ID NO: 2172 - protein, 515 aa, Homo sapien
RVLDETARERARLQIEIGKLRAELDEVNKSAKKREGELTVAQGRVKDLESLFHRSEVELAAALSDKRGLESDVAELRAQLAKAEDGHAVAKKQLEKETLMRVDLENRCQSLQEELDFRKSVFEEEVRETRRRHERRLVEVDSSRQQEYDFKMAQALEELRSQHDEQVRLYKLELEQTYQAKLDSAKLSSDQNDKAASAAREELKEARMRLESLSYQLSGLQKQASAAEDRIRELEEAMAGERDKFRKMLDAKEQEMTEMRDVMQQQLAEYQELLDVKLALDMEINAYRKLLEGEEESLKLSPSPSSRVTVSRATSSSSGSLSATGRLGRSKRKRWRWRSPWQRPKRPGHGHGWQRWLPPGPAGLGLGQRHIEEIDLEGKFVQLKNNSDKDQSLGNWRIKRQVLEGEEIAYKFTPKYILRAGQMVTVWAAGAGVAHSPPSTLVWKGQSSWGTGESFRTVLVNADGEEVAMRTVKKSSVMRENENGEEEEEEAEFGEEDLFHQQGDPRTTSRGCYVM

SEQ ID NO: 2173 - DNA, 831 bp, Homo sapien
cttattatgactgaacaagcaagaagatatctgagtacttacacagctaccagtagtacttcaagagctctcatactgtaattgttattaaaattgatgatatgccccactcccttactgcagtctctactaaattaggttgcagtgaaatttttctcaattagttgtttttaaagttgtaagatagcccttttaatacagcatcttttttctattctatatagtaggcagaaagctagtaagtcacttaaggggtagatagtttcatagtttattttttaagagatgagatttttaaaaattgtttttaaagaacaagatgggaaaataatagaatgttcatggatttctaaaagtaaattctcatatattttcttcacaagatatatgttgctactctcttgatgctgcagttttgttatagataggtgtatgagtatatatgatttctgaaattagtctatgtatggaaagcacacatgattttatgaagtacttttgcccatgtgctgatttacttaggctaccatttacaaagaaacacattgaaaaggaatttaaaggaaggatagaaagttgcactactaattttttgttttttttttcagaagcagtaaaattaactacagtgttaaatgtatttatttgagcatagtactgaaaacaaaaagcattcaaaaaagagttttttctttattagtaaatagtattttcttaatctcagaggagctgagagttttgttgaatgtattgtacagtatgtaggagcaggagaactttgtaaattggaaagaagtctgtttttataatttatttttatttttaaagctt

SEQ ID NO: 2174 - protein, 26 aa, Homo sapien
LIMTEQARRYLSTYTATSSTSRALIL

SEQ ID NO: 2175 - DNA, 4685 bp, Homo sapien
gggagcgcggggagcgcgggccggcggcggcgagggaggacgggggcgcagacggccggcgcgcggcgcggctaccatgggcgtgcggtgagcagccgctcgggacgacttcctcggctgcgcggcgctcgcgcggagctccccggccggcggtgcgtccccacggtcaccatgaaagacgacttcgcagaggaggaggaggtgcaatccttcggttacaagcggtttggtattcaggaaggaacacaatgtaccaaatgtaaaaataactgggcactgaagttttctatcatattattatacattttgtgtgccttgctaacaatcacagtagccattttgggatataaagttgtagagaaaatggacaatgtcacaggtggcatggaaacatctcgccaaacctatgatgacaagctcacagcagtggaaagtgacctgaaaaaattaggtgaccaaactgggaagaaagctatcagcaccaactcagaactctccaccttcagatcagacattctagatctccgtcagcaacttcgtgagattacagaaaaaaccagcaagaacaaggatacgctggagaagttacaggcgagcggggatgctctggtggacaggcagagtcaattgaaagaaactttggagaataactctttcctcatcaccactgtaaacaaaaccctccaggcgtataatggctatgtcacgaatctgcagcaagataccagcgtgctccagggcaatctgcagaaccaaatgtattctcataatgtggtcatcatgaacctcaacaacctgaacctgacccaggtgcagcagaggaacctcatcacgaatctgcagcggtctgtggatgacacaagccaggctatccagcgaatcaagaacgactttcaaaatctgcagcaggtttttcttcaagccaagaaggacacggattggctgaaggagaaagtgcagagcttgcagacactggctgccaacaactctgcgttggccaaagccaacaacgacaccctggaggatatgaacagccagctcaactcattcacaggtcagatggagaacatcaccactatctctcaagccaacgagcagaacctgaaagacctgcaggacttacacaaagatgcagagaatagaacagccatcaagttcaaccaactggaggaacgcttccagctctttgagacggatattgtgaacatcattagcaatatcagttacacagcccaccacctgcggacgctgaccagcaatctaaatgaagtcaggaccacttgcacagatacccttaccaaacacacagatgatctgacctccttgaataataccctggccaacatccgtttggattctgtttctctcaggatgcaacaagatttgatgaggtcgaggttagacactgaagtagccaacttatcagtgattatggaagaaatgaagctagtagactccaagcatggtcagctcatcaagaattttacaatactacaaggtccaccgggccccaggggtccaagaggtgacagaggatcccagggaccccctggcccaactggcaacaagggacagaaaggagagaagggggagcctggaccacctggccctgcgggtgagagaggcccaattggaccagctggtccccccggagagcgtggcggcaaaggatctaaaggctcccagggccccaaaggctcccgtggttcccctgggaagcccggccctcagggccccagtggggacccaggccccccgggcccaccaggcaaagagggactccccggccctcagggccctcctggcttccagggacttcagggcaccgttggggagcctggggtgcctggacctcggggactgccaggcttgcctggggtaccaggcatgccaggccccaagggcccccccggccctcctggcccatcaggagcggtggtgcccctggccctgcagaatgagccaaccccggcaccggaggacaatagtaagtccaagccctccctccagccagggggacagggcagtgcatgtgcttgagactgagccaacccccagtgtgtggccccacccatgttatttttgtttttgtttttgttttgagacagggtctcactctgttgcccaggctggagtgcagtggcgtgatctcggctcactgcaacccccacatcccgggttcaagtgattctcctgccttagcctcccaggtagctgggaatacaagcgtgtgcccccacagccagctaatttttgtatttttagtagagaggggtttcacagtgttgggcagggtggtttcaaacttctggcctcaagtgatccacctacctagtttcccaaagtgctgggaatacaggtgtgaaccaccacgttttgtcccccggctgcatattatttaacagcaaaggcatcataggggttggcacaggagccctgctgccagaacaggcctccataccaggcatgtgtctctctctaaacgccattgggttttttagtgctcatttgttttatgtattatgtgtgtatgtatgggacagggtctcactctgtcacccaggctggaatgacgaagtgaagtagtgcaaacatagctcattgcagctttgacctcctgggcttaggtgatcttcccactcagactcctgcgtagctgggaccacaggggtatgccaccacacctggctaattttttattttcctttttgtagaaacagggtcttgctatgttgcccaggctggtcttgaactcctggcctcaagcaaccctcctgcctcagtcttgcaaagtgctgggattccaggtgggagccactgcacctggctcttgcacttgtttatttataggagccagccctcagaagacaaacacaatgcaaaacatttccttcagggaagcctgctggccgccctgagcgctcttccctcgttttacatcctcactctggagatagatgggctccctcggttagctccatcaacatgtggatggaaccctctgctattgatgactacatttaatttctttttgagaaaggtgttagatgttacggtgccttctagtcttttgataattaaacctttggcaaaactcgaatgtttggttagcaaccaagcctatttttctctcctttgacccaaccgctattctacttgattttggtcggtgaggcccgggttatttttgttgatccgtgagcccatttttggtgctgggttctcacatccaagtgttcctgggttccgtatgattccagactgacgctgaacatctgtgcctgccctgcttcttgttgttgcttctgtcatttctgtcattgtgaagacggatccaaacacagaagaacaaagacccagtccaagatccatccagattatgtggtttcggcttgtgctctgcagtccactttgggtcatgcttgctgcgagcacgtccgtgaacgtcagctgtgggcctcgtgcagggacgctcaggctgctcccagcgggaccacagttttggcctctgaaacacagctgaagaaaggcagagtgctttctgtgatcttttaatcaatgttttccacttttgcattcctaggctgcccgcctcactggaagaacttcacagacaaatgctactatttttcagttgagaaagaaatttttgaggatgcaaagcttttctgtgaagacaagtcttcacatcttgttttcataaacactagagaggaacagcaatggataaaaaaacagatggtagggagagagagccactggatcggcctcacagactcagagcgtgaaaatgaatggaagtggctggatgggacatctccagactacaaaaattggaaagctggacagccggataactggggtcatggccatgggccaggagaagactgtgctgggttgatttatgctgggcagtggaacgatttccaatgtgaagacgtcaataacttcatttgcgaaaaagacagggagacagtactgtcatctgcattataacggactgtgatgggatcacatgagcaaattttcagctctcaaaggcaaaggacactcctttctaattgcatcaccttctcatcagattgaaaaaaaaaaagcactgaaaaccaattactgaaaaaaaattgacagctagtgttttttaccatccgtcattacccaaagacttgggaactaaaatgttccccagggtgatatgctgattttcattgtgcacatggactgaatcacatagattctcctccgtcagtaaccgtgcgattatacaaattatgtcttccaaagtatggaacactccaatcagaaaaaggttatcattggtcgttgagttatgggaagaacttaagcatatactgtgtaaacagtgccatacatttctaaaatcccaagtgtaggaaaaatatgcagacatacagatatataggccaactattagtaataatatgaaatatacttaaagagcttttaaaactttgtatttttgtacaaaatatttgtcttttacaatttttttcctttttttttttttgtcattttaccgacataatacatggagccaaagaaaacaataatggtactaataaaaactcctagggtttcctgtcagatttaattctacccagtggcaaagaattttttcaattgtggctttaaaaaaataattaaatatacatgtatatatatat

SEQ ID NO: 2176 - protein, 622 aa, Homo sapien [sequence omitted]

SEQ ID NO: 2177 - DNA, 3178 bp, Homo sapien
  Unsure 990: Unknown base
  Unsure 1015: Unknown base
  Unsure 1039: Unknown base
  Unsure 1063: Unknown base
  Unsure 1065: Unknown base
  Unsure 1123: Unknown base
  Unsure 1559: Unknown base
  Unsure 1564-1565: Unknown base
  Unsure 1587: Unknown base
  Unsure 1590: Unknown base
  Unsure 1596: Unknown base
  Unsure 1637: Unknown base
  Unsure 1645: Unknown base
  Unsure 1649-1650: Unknown base
  Unsure 1657: Unknown base
  Unsure 1665: Unknown base
  Unsure 1691: Unknown base
  Unsure 1703: Unknown base
  Unsure 1722: Unknown base
  Unsure 1737: Unknown base
  Unsure 1740: Unknown base
  Unsure 1755: Unknown base
  Unsure 1759: Unknown base
  Unsure 1763-1764: Unknown base
  Unsure 1770: Unknown base
  Unsure 1774-1775: Unknown base
  Unsure 1933: Unknown base
  Unsure 1954: Unknown base
  Unsure 1967-1968: Unknown base
  Unsure 1993: Unknown base
  Unsure 1997: Unknown base
  Unsure 2168: Unknown base
  Unsure 2189: Unknown base
  Unsure 2207: Unknown base
  Unsure 2210: Unknown base
  Unsure 2247-2248: Unknown base
  Unsure 2394: Unknown base
  Unsure 2467: Unknown base
  Unsure 2576: Unknown base
  Unsure 2580: Unknown base
  Unsure 2582: Unknown base
  Unsure 3053: Unknown base
  Unsure 3148: Unknown base
agttgagcgcagtcgccgctccagtctatccggcactaggaacagccccgggggcgagacggtccccgccatgtctgcggccatgagggagaggttcgaccggttcctgcacgagaagaactgcatgactgaccttctggccaagctcgaggccaaaaccggcgtgaacaggagcttcatcgctcttggtgtcatcggactggtggccttgtacctggtgttcggttatggagcctctctcctctgcaacctgataggatttggctacccagcctacatctcaattaaagctatagagagtcccaacaaagaagatgatacccagtggctgacctactgggtagtgtatggtgtgttcagcattgctgaattcttctctgatatcttcctgtcatggttccccttctactacatgctgaagtgtggcttcctgttgtggtgcatggccccgagcccttctaatggggctgaactgctctacaagcgcatcatccgtcctttcttcctgaagcacgagtcccagatggacagtgtggtcaaggaccttaaagacaagtccaaagagactgcagatgccatcactaaagaagcgaagaaagctaccgtgaatttactgggtgaagaaaagaagagcacctaaaccagactaaaccagactggatggaaacttcctgccctctctgtaccttcctactggagcttgatgttatattagggactgtggtataattattttaataatgttgccttggaaacattttgagatattaaagattggaatgtgttgtaagtttctttgcttacttttactgtctatatatatagggagcactttaaacttaatgcagtgggcagtgtccacgtttttggaaaatgtattttgcctctgggtaggaaaagatgtatgttgctatcctgcaggaaatataaacttaaaataaaattatataccccacaggctgtgtactttactgggctctccctgcacgnattttctctgtagttacatttaggntaatctttatggttctacttcctntaatgtacaattttatataattcngnaatgtttttaatgtatttgtgcacatgtacatatggaaatgttactgtctgactacancatgcatcatgctcatggggagggagcaggggaaggttgtatgtgtcatttataacttctgtacagtaagaccacctgcaacaagctggaggaaccattgtgctggtgtggtctactaaataatactttaggaaatacgtgattaatatgcaagtgaacaaagtgagaaatgaaatcgaatggagattggcctggttgtttccgtagtatatggcatatgaataccaggatagctttataaagcagttagttagttagttactcactctagtgataaatcgggaaatttacacacacacacacacacacacacacacacacacacacacacacacacacacagagtaccctgtaactctcaattccctgaaaaactagtaatactgtcttatctgctataaactttacatatttgtctattgtcaagatgctacantggannccatttctggttttatcttcanagnggaganacatgttgatttagtcttctttcccaatcttcttttttaanccagtttnaggnncttctgnagatttgnccacctctgattacatgtatgttctngtttgtatcatnagcaacaacatgctaatgncgacacctagctctnagngcaattctgggagantganaggnngtatanagtnncccataatctgcttggcaatagttaagtcaatctatcttcagtttttctctggcctttaaggtcaaacacaagaggcttccctagtttacaagtcagagtcacttgtagtccatttaaatgccctcatccgtattctttgtgttgataagctgcacangactacatagtaagtacagancagtaaagttaanncggatgtctccattgatctgccaantcgntatagagagcaatttgtctggactagaaaatctgagttttacaccatactgttaagagtccttttgaattaaactagactaaaacaagtgtataactaaactaacaagattaaatatccagccagtacagtattttttaaggcaaataaagatgattagctcaccttgagntaacaatcaggtaagatcatnacaatgtctcatgatgtnaanaatattaaagatatcaatactaagtgacagtatcacnnctaatataatatggatcagagcatttattttggggaggaaaacagtggtgattaccggcattttattaaacttaaaactttgtagaaagcaaacaaaattgttcttgggagaaaatcaacttttagattaaaaaaattttaagtanctaggagtatttaaatccttttcccataaataaaagtacagttttcttggtggcagaatgaaaatcagcaacntctagcatatagactatataatcagattgacagcatatagaatatattatcagacaagatgaggaggtacaaaagttactattgctcataatgacttacaggctaaaantagntntaaaatactatattaaattctgaatgcaatttttttttgttcccttgagaccaaaatttaagttaactgttgctggcagtctaagtgtaaatgttaacagcaggagaagttaagaattgagcagttctgttgcatgatttcccaaatgaaatactgccttggctagagtttgaaaaactaattgagcctgtgcctggctagaaaacaagcgtttatttgaatgtgaatagtgtttcaaaggtatgtagttacagaattcctaccaaacagcttaaattcttcaagaaagaattcctgcagcagttattcccttacctgaaggcttcaatcatttggatcaacaactgctactctcgggaagactcctctactcacagctgaagaaaatgagcacacccttcacactgttatcacctatcctgaagatgtgatacactgaatggaaataaatagatgtaaataaaattgagntctcatttaaaaaaaaccatgtgcccaatgggaaaatgacctcatgttgtggtttaaacagcaactgcacccactagcacagcccattgagctancctatatatacatctctgtcagtgcccctc

SEQ ID NO: 2178 - protein, 185 aa, Homo sapien
MRERFDRFLHEKNCMTDLLAKLEAKTGVNRSFIALGVIGLVALYLVFGYGASLLCNLIGFGYPAYISIKAIESPNKEDDTQWLTYWVVYGVFSIAEFFSDIFLSWFPFYYMLKCGFLLWCMAPSPSNGAELLYKRIIRPFFLKHESQMDSVVKDLKDKSKETADAITKEAKKATVNLLGEEKKST

SEQ ID NO: 2179 - DNA, 1513 bp, Homo sapien
ggggtactcggcggcggcggagcgggcggcagagcagggcggcggcgactcgcagggtaccaccatcttaaggacagaaaagctacaggactctaggaggccaccgtcctgatttgggaagtccaacttactttggccagacagcagctaagctggttcatcccatcagcctggattggtgaaactgaatcacaggagatatttccaggtttgctgggatgggaaacctgctcaaagtccttaccagggaaattgaaaactatccacactttttcctggattttgaaaatgctcagcctacagaaggagagagagaaatctggaaccagatcagcgccgtccttcaggattctgagagcatccttgcagacctgcaggcttacaaaggcgcaggcccagagatccgagatgcaattcaaaatcccaatgacattcagcttcaagaaaaagcttggaatgcggtgtgccctcttgttgtgaggctaaagagattttacgagttttccattagactagaaaaagctcttcagagtttattggaatctctgacttgtccaccctacacaccaacccaacacctggaaagggaacaggccctggcaaaggagtttgccgaaattttacattttacccttcgattcgatgagctgaagatgaggaacccggctattcagaatgacttcagctactacagaagaacaatcagtcgcaaccgcatcaacaacatgcacctagacattgagaatgaagtcaataatgagatggccaatcgaatgtccctcttctatgcagaagccacgccaatgctgaaaacccttagcaatgccacaatgcactttgtctctgaaaacaaaactctgccaatagagaacaccacagactgcctcagcacaatgacaagtgtctgtaaagtcatgctggaaactccggagtacagaagtaggtttacgagtgaagagaccctgatgttctgcatgagggtgatggtgggagtcatcatcctctatgaccatgtccaccctgtgggagctttctgcaagacatccaagatcgatatgaaaggctgcataaaagttttgaaggagcaggccccagacagtgtggaggggctgctaaatgccctcaggttcactacaaagcacttgaacgatgaatcaacttccaaacagattcgagcaatgcttcagtagagctctgctcaaagaagaggatctatgtgctgacctcagaagatgtatatgtttacataatttaatacagattgatgttaatacttgtgtatttacataaccgtttccttcttgtcactgaaatatatggaccttaatttgtatcctgactgactcaacccagcagagcataaattgacttgagagccttacctttgatgtctgaaatgaaacccccttctccaaaggcaaaattcggagactttgatctttgctactggagtcctttaacaacatctataacgataaaaaattcctaattgtcaaaaaaaaaaaaaaaaaaa

SEQ ID NO: 2180 - protein, 323 aa, Homo sapien
MGNLLKVLTREIENYPHFFLDFENAQPTEGEREIWNQISAVLQDSESILADLQAYKGAGPEIRDAIQNPNDIQLQEKAWNAVCPLVVRLKRFYEFSIRLEKALQSLLESLTCPPYTPTQHLEREQALAKEFAEILHFTLRFDELKMRNPAIQNDFSYYRRTISRNRINNMHLDIENEVNNEMANRMSLFYAEATPMLKTLSNATMHFVSENKTLPIENTTDCLSTMTSVCKVMLETPEYRSRFTSEETLMFCMRVMVGVIILYDHVHPVGAFCKTSKIDMKGCIKVLKEQAPDSVEGLLNALRFTTKHLNDESTSKQIRAMLQ

SEQ ID NO: 2181 - DNA, 5287 bp, Homo sapien
ctggccgcggcgtggggacagcgaggcgcactggggcctcccagcgccgggccggccgcgccgtccagcccgaggtctacggctttgcgctccgagcccagaggaagatgcctgccggcaccgagctcgggctgcggggctgaacgcctgtcttccaggcgcacggcagcactgccctcggccggtgtcggtagcggcactcggcgtgccccgggcggacgaagagcgcaggctgggtacaccttgcccgaatcggcggagttcgcagctagcgagggcgggccggccggcccggatgggcgcggggtttgcggcccccgccgggtgctccggagcggcccgggcaccgggggcacgctgagtgccggagccgcggccgcagagagaacttggggcgggggccatgcaccggtgcggagtctagagccgagcggagcgccccgcgggcccgcccgcgtctgcggccgttcgggtcctcacagtccccgcgcccggagttcgcagcgcgctccagacaagatggcgcggccggtccggggagggctcggggccccgcgccgctcgccttgccttctccttctctggctgcttttgcttcggctggagccggtgaccgccgcggccggcccgcgggcgccctgcgcggccgcctgcacttgcgctggggactcgctggactgcggtgggcgcgggctggctgcgttgcccggggacctgccctcctggacgcggagcctaaacctgagttacaacaaactctctgagattgaccctgctggttttgaggacttgccgaacctacaggaagtgtacctcaataataatgagttgacagcggtaccatccctgggcgctgcttcatcacatgtcgtctctctctttctgcagcacaacaagattcgcagcgtggaggggagccagctgaaggcctacctttccttagaagtgttagatctgagtttgaacaacatcacggaagtgcggaacacctgctttccacacggaccgcctataaaggagctcaacctggcaggcaatcggattggcaccctggagttgggagcatttgatggtctgtcacggtcgctgctaactcttcgcctgagcaaaaacaggatcacccagcttcctgtaagagcattcaagctacccaggctgacacaactggacctcaatcggaacaggattcggctgatagagggcctcaccttccaggggctcaacagcttggaggtgctgaagcttcagcgaaacaacatcagcaaactgacagatggggccttctggggactgtccaagatgcatgtgctgcacctggagtacaacagcctggtagaagtgaacagcggctcgctctacggcctcacggccctgcatcagctccacctcagcaacaattccatcgctcgcattcaccgcaagggctggagcttctgccagaagctgcatgagttggtcctgtccttcaacaacctgacacggctggacgaggagagcctggccgagctgagcagcctgagtgtcctgcgtctcagccacaattccatcagccacattgcggagggtgccttcaagggactcaggagcctgcgagtcttggatctggaccataacgagatttcgggcacaatagaggacacgagcggcgccttctcagggctcgacagcctcagcaagctgactctgtttggaaacaagatcaagtctgtggctaagagagcattctcggggctggaaggcctggagcacctgaaccttggagggaatgcgatcagatctgtccagtttgatgcctttgtgaagatgaagaatcttaaagagctccatatcagcagcgacagcttcctgtgtgactgccagctgaagtggctgcccccgtggctaattggcaggatgctgcaggcctttgtgacagccacctgtgcccacccagaatcactgaagggtcagagcattttctctgtgccaccagagagtttcgtgtgcgatgacttcctgaagccacagatcatcacccagccagaaaccaccatggctatggtgggcaaggacatccggtttacatgctcagcagccagcagcagcagctcccccatgacctttgcctggaagaaagacaatgaagtcctgaccaatgcagacatggagaactttgtccacgtccacgcgcaggacggggaagtgatggagtacaccaccatcctgcacctccgtcaggtcactttcgggcacgagggccgctaccaatgtgtcatcaccaaccactttggctccacctattcacataaggccaggctcactgtgaatgtgttgccatcattcaccaaaacgccccacgacataaccatccggaccaccaccatggcccgcctcgaatgtgctgccacaggtcacccaaaccctcagattgcctggcagaaggatggaggcacggatttccccgctgcccgtgagcgacgcatgcatgtcatgccggatgacgacgtgtttttcatcactgatgtgaaaatagatgacgcaggggtttacagctgtactgctcagaactcagccggttctatttcagctaatgccaccctgactgtcctagagaccccatccttggtggtccccttggaagaccgtgtggtatctgtgggagaaacagtggccctccaatgcaaagccacggggaaccctccgccccgcatcacctggttcaagggggaccgcccgctgagcctcactgagcggcaccacctgacccctgacaaccagctcctggtggttcagaacgtggtggcagaggatgcgggccgatatacctgtgagatgtccaacaccctgggcacggagcgagctcacagccagctgagcgtcctgcccgcagcaggctgcaggaaggatgggaccacggtaggcatcttcaccattgctgtcgtgagcagcatcgtcctgacgtcactggtctgggtgtgcatcatctaccagaccaggaagaagagtgaagagtacagtgtcaccaacacagatgaaaccgtcgtgccaccagatgttccaagctacctctcttctcaggggaccctttctgaccgacaagaaaccgtggtcaggaccgagggtgcgggccctcaggccaatgggcacattgagagcaatggtgtgtgtccaagagatgcaagccactttccagagcccgacactcacagcgttgcctgcaggcagccaaagctctgtgctgggtctgcgtatcacaaagagccgtggaaagcgattgagaaagctgaagggacacctgggccacataagatggaacacggtggccgggtcgtatgcagtgactgcaacaccgaagtggactgttactccaggggacaagccttccacccccagcctgtgtccagagacagcgcacagccaagtgcgccaaatggcccggagccgggtgggagtgaccaagagcattctccacatcaccagtgcagcaggactgccgctgggtcctgccccgagtgccaagggtcgctctaccccagtaaccacgatagaatgctgacggctgtgaagaaaaagccaatggcatctctagatgggaaaggggattcttcctggactttagcaaggttgtatcacccggactctacagagctacagcctgcatcttcattaacttcaggcagtccagagcgcgcggaagcccagtacttgcttgtttccaatggccacctccccaaagcatgtgacgccagtcccgagtccacgccactgacaggacagctccccgggaaacagagggtgccactgctgttggcaccaaaaagctaggttttgtctacctcagttcttgtcataccaatctctacgggaaagagaggtaggagaggctgcgaggaagcttgggttcaagcgtcactcatctgtacatagttgtaactcccatgtggagtatcagtcgctcacaggacttggatctgaagcacagtaaacgcaagaggggatttgtgtacaaaaggcaaaaaaagtatttgatatcattgtacataagagttttcagagatttcatatatatcttttacagaggctattttaatctttagtgcatggttaacagaaaaaaattatacaattttgacaatattatttttcgtatcaggttgctgtttaattttggagggggtggggaaatagttctggtgccttaacgcatggctggaatttatagaggctacaaccacatttgttcacaggagtttttggtgcgggtggggaaggatggaaggccttggatttatattgcacttcatagacccctaggctgctgtgcggtgggactccacatgcgccggaaggagcttcaggtgagcactgctcatgtgtggatgcccctgcaacaggcttccctgtctgtagagccaggggtgcaagtgccatccacacttgcagtgaatggcttttccttttaggtttaagtcctgtctgtctgtaaggcgtagaatctgtccgtctgtaaggcgtagaatgagggttgttaatccatcacaagcaaaaggtcagaacagttaaacactgcctttcctcctcctcttattttatgataaaagcaaatgtggccttctcagtatcattcgattgctatttgagacttttaaattaaggtaaaggctgctggtgttggtacctgtggatttttctatactgatgttttcgttttgccaatataatgagtattacattggccttgggggacagaaaggaggaagttctgacttttcagggctaccttatttctactaaggacccagagcaggcctgtccatgccattccttcgcacagatgaaactgagctgggactggaaaggacagcccttgacctgggttctgggtataatttgcacttttgagactggtagctaaccatcttatgagtgccaatgtgtcatttagtaaaacttaaatagaaacaaggtccttcaaatgttcctttggccaaaagctgaagggagttactgagaaaatagttaacaattactgtcaggtgtcatcactgttcaaaaggtaagcacatttagaattttgttcttgacagttaactgactaatcttacttccacaaaatatgtgaatttgctgcttctgagaggcaatgtgaaagagggagtattacttttatgtacaaagttatttatttatagaaattttggtacagtgtacattgaaaaccatgtaaaatattgaagtgtctaacaaatggcattgaagtgtctttaataaaggttcatttataaatgtcaaaaaaaaaaaaaaaaaa

SEQ ID NO: 2182 - protein, 1094 aa, Homo sapien
MARPVRGGLGAPRRSPCLLLLWLLLLRLEPVTAAAGPRAPCAAACTCAGDSLDCGGRGLAALPGDLPSWTRSLNLSYNKLSEIDPAGFEDLPNLQEVYLNNNELTAVPSLGAASSHVVSLFLQHNKIRSVEGSQLKAYLSLEVLDLSLNNITEVRNTCFPHGPPIKELNLAGNRIGTLELGAFDGLSRSLLTLRLSKNRITQLPVRAFKLPRLTQLDLNRNRIRLIEGLTFQGLNSLEVLKLQRNNISKLTDGAFWGLSKMHVLHLEYNSLVEVNSGSLYGLTALHQLHLSNNSIARIHRKGWSFCQKLHELVLSFNNLTRLDEESLAELSSLSVLRLSHNSISHIAEGAFKGLRSLRVLDLDHNEISGTIEDTSGAFSGLDSLSKLTLFGNKIKSVAKRAFSGLEGLEHLNLGGNAIRSVQFDAFVKMKNLKELHISSDSFLCDCQLKWLPPWLIGRMLQAFVTATCAHPESLKGQSIFSVPPESFVCDDFLKPQIITQPETTMAMVGKDIRFTCSAASSSSSPMTFAWKKDNEVLTNADMENFVHVHAQDGEVMEYTTILHLRQVTFGHEGRYQCVITNHFGSTYSHKARLTVNVLPSFTKTPHDITIRTTTMARLECAATGHPNPQIAWQKDGGTDFPAARERRMHVMPDDDVFFITDVKIDDAGVYSCTAQNSAGSISANATLTVLETPSLVVPLEDRVVSVGETVALQCKATGNPPPRITWFKGDRPLSLTERHHLTPDNQLLVVQNVVAEDAGRYTCEMSNTLGTERAHSQLSVLPAAGCRKDGTTVGIFTIAVVSSIVLTSLVWVCIIYQTRKKSEEYSVTNTDETVVPPDVPSYLSSQGTLSDRQETVVRTEGAGPQANGHIESNGVCPRDASHFPEPDTHSVACRQPKLCAGSAYHKEPWKAIEKAEGTPGPHKMEHGGRVVCSDCNTEVDCYSRGQAFHPQPVSRDSAQPSAPNGPEPGGSDQEHSPHHQCSRTAAGSCPECQGSLYPSNHDRMLTAVKKKPMASLDGKGDSSWTLARLYHPDSTELQPASSLTSGSPERAEAQYLLVSNGHLPKACDASPESTPLTGQLPGKQRVPLLLAPKS

SEQ ID NO: 2183 - DNA, 584 bp, Homo sapien
acactcgcttctggaacgtctgaggttatcaataagctcctagtccagacgccatgggtcatttcacagaggaggacaaggctactatcacaagcctgtggggcaaggtgaatgtggaagatgctggaggagaaaccctgggaaggctcctggttgtctacccatggacccagaggttctttgacagctttggcaacctgtcctctgcctctgccatcatgggcaaccccaaagtcaaggcacatggcaagaaggtgctgacttccttgggagatgccataaagcacctggatgatctcaagggcacctttgcccagctgagtgaactgcactgtgacaagctgcatgtggatcctgagaacttcaagctcctgggaaatgtgctggtgaccgttttggcaatccatttcggcaaagaattcacccctgaggtgcaggcttcctggcagaagatggtgactggagtggccagtgccctgtcctccagataccactgagctcactgcccatgatgcagagctttcaaggataggctttattctgcaagcaatacaaataataaatctattctgctaagagatcac

SEQ ID NO: 2184 - protein, 147 aa, Homo sapien
MGHFTEEDKATITSLWGKVNVEDAGGETLGRLLVVYPWTQRFFDSFGNLSSASAIMGNPKVKAHGKKVLTSLGDAIKHLDDLKGTFAQLSELHCDKLHVDPENFKLLGNVLVTVLAIHFGKEFTPEVQASWQKMVTGVASALSSRYH

SEQ ID NO: 2185 - DNA, 4989 bp, Homo sapien
ttttttttttttttgagaaagggaatttcatcccaaataaaaggaatgaagtctggctccggaggagggtccccgacctcgctgtgggggctcctgtttctctccgccgcgctctcgctctggccgacgagtggagaaatctgcgggccaggcatcgacatccgcaacgactatcagcagctgaagcgcctggagaactgcacggtgatcgagggctacctccacatcctgctcatctccaaggccgaggactaccgcagctaccgcttccccaagctcacggtcattaccgagtacttgctgctgttccgagtggctggcctcgagagcctcggagacctcttccccaacctcacggtcatccgcggctggaaactcttctacaactacgccctggtcatcttcgagatgaccaatctcaaggatattgggctttacaacctgaggaacattactcggggggccatcaggattgagaaaaatgctgacctctgttacctctccactgtggactggtccctgatcctggatgcggtgtccaataactacattgtggggaataagcccccaaaggaatgtggggacctgtgtccagggaccatggaggagaagccgatgtgtgagaagaccaccatcaacaatgagtacaactaccgctgctggaccacaaaccgctgccagaaaatgtgcccaagcacgtgtgggaagcgggcgtgcaccgagaacaatgagtgctgccaccccgagtgcctgggcagctgcagcgcgcctgacaacgacacggcctgtgtagcttgccgccactactactatgccggtgtctgtgtgcctgcctgcccgcccaacacctacaggtttgagggctggcgctgtgtggaccgtgacttctgcgccaacatcctcagcgccgagagcagcgactccgaggggtttgtgatccacgacggcgagtgcatgcaggagtgcccctcgggcttcatccgcaacggcagccagagcatgtactgcatcccttgtgaaggtccttgcccgaaggtctgtgaggaagaaaagaaaacaaagaccattgattctgttacttctgctcagatgctccaaggatgcaccatcttcaagggcaatttgctcattaacatccgacgggggaataacattgcttcagagctggagaacttcatggggctcatcgaggtggtgacgggctacgtgaagatccgccattctcatgccttggtctccttgtccttcctaaaaaaccttcgcctcatcctaggagaggagcagctagaagggaattactccttctacgtcctcgacaaccagaacttgcagcaactgtgggactgggaccaccgcaacctgaccatcaaagcagggaaaatgtactttgctttcaatcccaaattatgtgtttccgaaatttaccgcatggaggaagtgacggggactaaagggcgccaaagcaaaggggacataaacaccaggaacaacggggagagagcctcctgtgaaagtgacgtcctgcatttcacctccaccaccacgtcgaagaatcgcatcatcataacctggcaccggtaccggccccctgactacagggatctcatcagcttcaccgtttactacaaggaagcaccctttaagaatgtcacagagtatgatgggcaggatgcctgcggctccaacagctggaacatggtggacgtggacctcccgcccaacaaggacgtggagcccggcatcttactacatgggctgaagccctggactcagtacgccgtttacgtcaaggctgtgaccctcaccatggtggagaacgaccatatccgtggggccaagagtgagatcttgtacattcgcaccaatgcttcagttccttccattcccttggacgttctttcagcatcgaactcctcttctcagttaatcgtgaagtggaaccctccctctctgcccaacggcaacctgagttactacattgtgcgctggcagcggcagcctcaggacggctacctttaccggcacaattactgctccaaagacaaaatccccatcaggaagtatgccgacggcaccatcgacattgaggaggtcacagagaaccccaagactgaggtgtgtggtggggagaaagggccttgctgcgcctgccccaaaactgaagccgagaagcaggccgagaaggaggaggctgaataccgcaaagtctttgagaatttcctgcacaactccatcttcgtgcccagacctgaaaggaagcggagagatgtcatgcaagtggccaacaccaccatgtccagccgaagcaggaacaccacggccgcagacacctacaacatcaccgacccggaagagctggagacagagtaccctttctttgagagcagagtggataacaaggagagaactgtcatttctaaccttcggcctttcacattgtaccgcatcgatatccacagctgcaaccacgaggctgagaagctgggctgcagcgcctccaacttcgtctttgcaaggactatgcccgcagaaggagcagatgacattcctgggccagtgacctgggagccaaggcctgaaaactccatctttttaaagtggccggaacctgagaatcccaatggattgattctaatgtatgaaataaaatacggatcacaagttgaggatcagcgagaatgtgtgtccagacaggaatacaggaagtatggaggggccaagctaaaccggctaaacccggggaactacacagcccggattcaggccacatctctctctgggaatgggtcgtggacagatcctgtgttcttctatgtccaggccaaaacaggatatgaaaacttcatccatctgatcatcgctctgcccgtcgctgtcctgttgatcgtgggagggttggtgattatgctgtacgtcttccatagaaagagaaataacagcaggctggggaatggagtgctgtatgcctctgtgaacccggagtacttcagcgctgctgatgtgtacgttcctgatgagtgggaggtggctcgggagaagatcaccatgagccgggaacttgggcaggggtcgtttgggatggtctatgaaggagttgccaagggtgtggtgaaagatgaacctgaaaccagagtggccattaaaacagtgaacgaggccgcaagcatgcgtgagaggattgagtttctcaacgaagcttctgtgatgaaggagttcaattgtcaccatgtggtgcgattgctgggtgtggtgtcccaaggccagccaacactggtcatcatggaactgatgacacggggcgatctcaaaagttatctccggtctctgaggccagaaatggagaataatccagtcctagcacctccaagcctgagcaagatgattcagatggccggagagattgcagacggcatggcatacctcaacgccaataagttcgtccacagagaccttgctgcccggaattgcatggtagccgaagatttcacagtcaaaatcggagattttggtatgacgcgagatatctatgagacagactattaccggaaaggaggcaaagggctgctgcccgtgcgctggatgtctcctgagtccctcaaggatggagtcttcaccacttactcggacgtctggtccttcggggtcgtcctctgggagatcgccacactggccgagcagccctaccagggcttgtccaacgagcaagtccttcgcttcgtcatggagggcggccttctggacaagccagacaactgtcctgacatgctgtttgaactgatgcgcatgtgctggcagtataaccccaagatgaggccttccttcctggagatcatcagcagcatcaaagaggagatggagcctggcttccgggaggtctccttctactacagcgaggagaacaagctgcccgagccggaggagctggacctggagccagagaacatggagagcgtccccctggacccctcggcctcctcgtcctccctgccactgcccgacagacactcaggacacaaggccgagaacggccccggccctggggtgctggtcctccgcgccagcttcgacgagagacagccttacgcccacatgaacgggggccgcaagaacgagcgggccttgccgctgccccagtcttcgacctgctgatccttggatcctgaatctgtgcaaacagtaacgtgtgcgcacgcgcagcggggtggggggggagagagagttttaacaatccattcacaagcctcctgtacctcagtggatcttcagttctgcccttgctgcccgcgggagacagcttctctgcagtaaaacacatttgggatgttccttttttcaatatgcaagcagctttttattccctgcccaaacccttaactgacatgggcctttaagaaccttaatgacaacacttaatagcaacagagcacttgagaaccagtctcctcactctgtccctgtccttccctgttctccctttctctctcctctctgcttcataacggaaaaataattgccacaagtccagctgggaagccctttttatcagtttgaggaagtggctgtccctgtggccccatccaaccactgtacacacccgcctgacaccgtgggtcattacaaaaaaacacgtggagatggaaatttttacctttatctttcacctttctagggacatgaaatttacaaagggccatcgttcatccaaggctgttaccattttaacgctgcctaattttgccaaaatcctgaactttctccctcatcggcccggcgctgattcctcgtgtccggaggcatgggtgagcatggcagctggttgctccatttgagagacacgctggcgacacactccgtccatccgactgcccctgctgtgctgctcaaggccacaggcacacaggtctcattgcttctgactagattattatttgggggaactggacacaataggtctttctctcagtgaaggtggggagaagctgaaccggc

SEQ ID NO: 2186 - protein, 1367 aa, Homo sapien
MKSGSGGGSPTSLWGLLFLSAALSLWPTSGEICGPGIDIRNDYQQLKRLENCTVIEGYLHILLISKAEDYRSYRFPKLTVITEYLLLFRVAGLESLGDLFPNLTVIRGWKLFYNYALVIFEMTNLKDIGLYNLRNITRGAIRIEKNADLCYLSTVDWSLILDAVSNNYIVGNKPPKECGDLCPGTMEEKPMCEKTTINNEYNYRCWTTNRCQKMCPSTCGKRACTENNECCHPECLGSCSAPDNDTACVACRHYYYAGVCVPACPPNTYRFEGWRCVDRDFCANILSAESSDSEGFVIHDGECMQECPSGFIRNGSQSMYCIPCEGPCPKVCEEEKKTKTIDSVTSAQMLQGCTIFKGNLLINIRRGNNIASELENFMGLIEVVTGYVKIRHSHALVSLSFLKNLRLILGEEQLEGNYSFYVLDNQNLQQLWDWDHRNLTIKAGKMYFAFNPKLCVSEIYRMEEVTGTKGRQSKGDINTRNNGERASCESDVLHFTSTTTSKNRIIITWHRYRPPDYRDLISFTVYYKEAPFKNVTEYDGQDACGSNSWNMVDVDLPPNKDVEPGILLHGLKPWTQYAVYVKAVTLTMVENDHIRGAKSEILYIRTNASVPSIPLDVLSASNSSSQLIVKWNPPSLPNGNLSYYIVRWQRQPQDGYLYRHNYCSKDKIPIRKYADGTIDIEEVTENPKTEVCGGEKGPCCACPKTEAEKQAEKEEAEYRKVFENFLHNSIFVPRPERKRRDVMQVANTTMSSRSRNTTAADTYNITDPEELETEYPFFESRVDNKERTVISNLRPFTLYRIDIHSCNHEAEKLGCSASNFVFARTMPAEGADDIPGPVTWEPRPENSIFLKWPEPENPNGLILMYEIKYGSQVEDQRECVSRQEYRKYGGAKLNRLNPGNYTARIQATSLSGNGSWTDPVFFYVQAKTGYENFIHLIIALPVAVLLIVGGLVIMLYVFHRKRNNSRLGNGVLYASVNPEYFSAADVYVPDEWEVAREKITMSRELGQGSFGMVYEGVAKGVVKDEPETRVAIKTVNEAASMRERIEFLNEASVMKEFNCHHVVRLLGVVSQGQPTLVIMELMTRGDLKSYLRSLRPEMENNPVLAPPSLSKMIQMAGEIADGMAYLNANKFVHRDLAARNCMVAEDFTVKIGDFGMTRDIYETDYYRKGGKGLLPVRWMSPESLKDGVFTTYSDVWSFGVVLWEIATLAEQPYQGLSNEQVLRFVMEGGLLDKPDNCPDMLFELMRMCWQYNPKMRPSFLEIISSIKEEMEPGFREVSFYYSEENKLPEPEELDLEPENMESVPLDPSASSSSLPLPDRHSGHKAENGPGPGVLVLRASFDERQPYAHMNGGRKNERALPLPQSSTC

SEQ ID NO: 2187 - DNA, 1112 bp, Homo sapien
tagcacttcatagactgctatcacgcattcatttttactagtacctattgaacactaagttccaggcactgggctaggcactgggatggtgtggtgagcaaaaactgaccagtcctgccgtggagtttgctgggggagacacatgttactcaaagaatcacactaaggatagcaatttatctcaaagctgcaagttcctgccatctacatgtgcccagagtccccaaaattgagtgtcaaacagaggctgggtgacctcctgtccaggattgctctcatcgtatgaatcgaagttttcatcttaacgtgtttttttctcctgagaataggccaaccaatcaatggctcagacagataagccaacatgcatcccgccggagctgccgaagatgctgaaggagtttgccaaagccgccattagggtgcagccgcaggacctcatccagtgggcagccgattattttgaggccctgtcccgtggagagacgcctccggtgagagagcggtctgagcgagtcgctttgtgtaaccgggcagagctaacacctgagctgttaaagatcctgcattctcaggttgctggcagactgatcatccgtgcagaggagctggcccagatgtggaaagtggtgaatctcccaacagatctgtttaatagtgtgatgaatgtgggtcgcttcacggaggagatcgagtggctgaagtttttagcccttgcttgcagcgctctgggagttactattaccaaaactctcaagatagtgtgtgaggtcttatcatgtgaccataatggtgggtcgccccggatcccgttcagcaccttccagtttctctacacgtatattgccaaagtggatggggagatctctgcatcacatgtcagcaggatgctaaactacatggaacaggaagtaattggccctgatggtataatcacagtgaatgactttacccaaaaccccagggttcagctggagtaaaagcacaattttggcaattttaaaggaagatacagagatgattgtacttcagaatgactgaaacccatataccacccaaaatccattttcttgtacaactggtacacactaataaacaattaaaaaaaaaaa

SEQ ID NO: 2188 - protein, 212 aa, Homo sapien
MAQTDKPTCIPPELPKMLKEFAKAAIRVQPQDLIQWAADYFEALSRGETPPVRERSERVALCNRAELTPELLKILHSQVAGRLIIRAEELAQMWKVVNLPTDLFNSVMNVGRFTEEIEWLKFLALACSALGVTITKTLKIVCEVLSCDHNGGSPRIPFSTFQFLYTYIAKVDGEISASHVSRMLNYMEQEVIGPDGIITVNDFTQNPRVQLE

SEQ ID NO: 2189 - DNA, 469 bp, Homo sapien
tttgggtaatctgagatgtgctttaaaaaaggaccgttgagaaaggggtggagtataaggaaaccgcaagtgagagggagtactctagtggggtgggggtgccgatacacagctaggcttaaggggccagggaaggaagtggtgccagaatcctagagatagtcatgattacgcaagagttgcccggcaggagagtccatagcaaccttgatgctgcagggtgggagccgggggattcaataccccaaactcagcctcctcctcctctccattcttctgctggggctccccaataatggaacatgacaaggagccagagggcgaaggagcctgttgataccattgagagagttcggcgtccccgggcaaaggaaggggagaagggtggggagtgggtctggaaggccccatgaaagacacctggcacaccccctaagtacactagcatccaaagtttatgaaaaacttc

SEQ ID NO: 2190 - DNA, 5226 bp, Homo sapien
aaaatacttgccctttggaaaaaaatcattctggcgtccacattcagactggtttagaggagagtaatactgaagacatgcccccccgaatcaaggtagcaattgcggagatgaaaagaaatgagtccaaaagatgcttaaatgtgaccattgaacaggatttgactcattggatatgaggccatggagcagtgtctggctaggtggatggatgttggtgctgtttagttaaataggaaactggaagagaagcaggcttgcaagaatggtaatattttggacgtgtaacttgtctggcaagatgttgaagaggtaaaggaggcagcacagcatcatgggccttggaggcagaagccgctttgatttactcagaacaccaaatcagtctccattttcttgactcagactacacccaagagattgcttccttccctgtgcttcctggccacttgctactctagctaggaagatctgcctcccttagctgaagtctaagatgtgtagcttattgatgcctctcctcttcttgttctgctgttgctgaatataatggggatgccagggcagacataccattcaacttgaatcttccttacccactttgtatagtcttacatgtcattgataccttgttttctggtacgcctaaaaggagtagaacttcaagtggtatttaaaagctttaagaaaagtcaaatttttacttttttcttcccatctgaggcatggatttattttctttttaaagaaatccaaatttttaaaagaagggatcttatttttaaaacgaagatcgataatatctactatgtactaaatgtcattctttaaaagttgttccctcataatttagtaaattacttccttttttaaaaaaaggaaagaaagagtgtttgtcttacaggctaacatcacaaacaataagtttcttctcatccatctccatttataaactagtgtgactgtcttctgagcacagtattaaacctggacagggagagggagggtgttagagaatgagagggaaagagagagaatacctacatataaggtgaccctaaagaaaagcctttcacccttcggaagatcttttcattttcatttttcttttttcaaacaccaacttgtaccagagggaagatctttttttaaaagcgtttcactaaaatttgtaaggaaataatgagctagataaaatattacagtgtttatttaatgaatttactcatatttaaaataatatctaaaaagagtaatttaggaatattgaggcaatgagacttgaaggttataaatagtggcagtgagaaaaggaatattatagataagctgttgaaaagaaaagatgctaagttttctagtgcttccttctgtttccaagggattatagaaatcggagtttgtttgacctgtttcacaggcatctcctttgtggactcattgtgtctcttccttaggctaatagtcaccatttatcatggacggttgtcatgagtgttgaagcacacttaacctgcttcgtcagagggtacttggcatcaccggtgcacagctggtgtcctagcaggagactaactagctgacacaccgtgctttgttagcctaataatcttatttgttaaaacttgccatttgttggatttttctattttaccccattataaacttcttattgagatcagatgacttctgaatagcatttgctgtatttttccaaggtaaagaatatctttttcagatttttctttctttctttaatgtcagaaatagaagaaatcttttctaccgaccttgtgccaggagatgtcatggtcattccattaaatgggacaataatgccttgtgatgctgtgcttattaatggtacctgcattgtaaacgaaagcatgttaacaggagaaagtgttccagtgacaaagactaatttgccaaatccttcagtggatgtgaaaggaataggagatcaattatataatccggaaacacataaacgacatactttgttttgtgggacaactgttattcagactcgtttctacactggagaactcgtcaaagccatagttgttagaacaggatttagtacttccaaaggacagcttgttcgttccatattgtatcccaaaccaactgattttaaactctacagagatgcctacttgtttctactatgtcttgtggcagttgctggcattgggtttatctacactattattaatagcattttaaatgaggtacaagttggggtcataattatcgagtctcttgatattatcacaattactgtgccccctgcacttcctgctgcaatgactgctggtattgtgtatgctcagagaagactgaaaaaaatcggtattttctgtatcagtcctcaaagaataaatatttgtggacagctcaatcttgtttgctttgacaagactggaactctaactgaagatggtttagatctttgggggattcaacgagtggaaaatgcacgatttctttcaccagaagaaaatgtgtgcaatgagatgttggtaaaatcccagtttgttgcttgtatggctacttgtcattcacttacaaaaattgaaggagtgctctctggtgatccacttgatctgaaaatgtttgaggctattggatggattctggaagaagcaactgaagaagaaacagcacttcataatcgaattatgcccacagtggttcgtcctcccaaacaactgcttcctgaatctacccctgcaggaaaccaagaaatggagctgtttgaacttccagctacttatgagataggaattgttcgccagttcccattttcttctgctttgcaacgtatgagtgtggttgccagggtgctgggggataggaaaatggacgcctacatgaaaggagcgcccgaggccattgccggtctctgtaaacctgaaacagttcctgtcgattttcaaaacgttttggaagacttcactaaacagggcttccgtgtgattgctcttgcacacagaaaattggagtcaaaactgacatggcataaagtacagaatattagcagagatgcaattgagaacaacatggattttatgggattaattataatgcagaacaaattaaagcaagaaccccctgcagtacttgaagatttgcataaagccaacattcgcaccgtcatggtcacaggtgacagtatgttgactgctgtctctgtggccagagattgtggaatgattctacctcaggataaagtgattattgctgaagcattacctccaaaggatgggaaagttgccaaaataaattggcattatgcagactccctcacgcagtgcagtcatccatcagcaattgacccagaggctattccggttaaattggtccatgatagcttagaggatcttcaaatgactcgttatcattttgcaatgaatggaaaatcattctcagtgatactggagcattttcaagaccttgttcctaagttgatgttgcatggcaccgtgtttgcccgtatggcacctgatcagaagacacagttgatagaagcattgcaaaatgttgattattttgttgggatgtgtggtgatggcgcaaatgattgtggtgctttgaagagggcacacggaggcatttccttatcggagctcgaagcttcagtggcatctccctttacctctaagactcctagtatttcctgtgtgccaaaccttatcagggaaggccgtgctgctttaataacttcctcctgtgaattagcactattttctatagttacttattctctggatcattttataatttccatattaatttcaagtatgctcgtgttattcttcagtgatttccacaattgtgcattttattctttggtttaagtactgaagcatataatgaaagtaattgctaagtagcagcttaaaaattcaattatccgattgtatttaacatctttaagagcatgatcataaagagctatttttgacaccccccccccacttttttaacatttagagttagtaagggttttatatctcttctgtccatattgttttcaaaggaatgaggtgtttaggtggctggaaaagcatttgtaggaagttagatttgaatatagacaaggtgggttattcacgttgagaatgttatttgaagaatgcctgtgaagccaggtgtgggttctactcagtgccatagatagactgagtcttctctcgtaggttaccattacatagtaattttgattctgaatttcacattaaattatttgagtttatacagacctaaattttaaaatctgtacatatattattttgatgtattaagatgaatattgctgatttaaattttatttatgcacatacttaaaggacagaaatgtctgggaaagtaattgttaaataatgatatgtaactttttaactttttaaataaataacaagatttttaatgtgtgtctccctcagggttgtttaaagttttttttctccctcaagtataaatagtggtaactatatgttttgtatcttctagcaccaactgctgtaaagcaatgctgcaaataatgcttgaatacaagtggctaagccaacaacagaataaatacttttatagtagttttataatcctgaaattcgaaagctttcccaattgcacttgcatctaaacaaaactgttgcagtttttactctatttattttgttccccatgtttatgaaagtcctgcacagtttcaaaggcatggtaaataatatatcaatgtttatgtagtctgttacagaaacagctatagataacattatccagtgaagagcaaaattcaagctttagaaaatattcatgcatgcaattttgacatatctaaaaataggtttttgtatatttatggtgggaggtggttgggaacttttaacaaaatggggtgttaatttttgtacagtctgtgggcatttacacatttttaatgtattaaaatttggtaattatgtgtacattaaattaataaaagttacttctagttatgatttgtgaattccctaagaccttggatttttttaagtaactttatatcagaaatgatactgcatctttatatttttaaaattgtattgctgctcaagaatggtaccctcttgtcaaaaaggcatacattcataattgtacattcagcattgtaaataatcttatgaaaccttttttgattgaagctattcaaaataaaaattttaatgaatgaaataa

SEQ ID NO: 2191 - protein, 701 aa, Homo sapien
MSEIEEIFSTDLVPGDVMVIPLNGTIMPCDAVLINGTCIVNESMLTGESVPVTKTNLPNPSVDVKGIGDQLYNPETHKRHTLFCGTTVIQTRFYTGELVKAIVVRTGFSTSKGQLVRSILYPKPTDFKLYRDAYLFLLCLVAVAGIGFIYTIINSILNEVQVGVIIIESLDIITITVPPALPAAMTAGIVYAQRRLKKIGIFCISPQRINICGQLNLVCFDKTGTLTEDGLDLWGIQRVENARFLSPEENVCNEMLVKSQFVACMATCHSLTKIEGVLSGDPLDLKMFEAIGWILEEATEEETALHNRIMPTVVRPPKQLLPESTPAGNQEMELFELPATYEIGIVRQFPFSSALQRMSVVARVLGDRKMDAYMKGAPEAIAGLCKPETVPVDFQNVLEDFTKQGFRVIALAHRKLESKLTWHKVQNISRDAIENNMDFMGLIIMQNKLKQEPPAVLEDLHKANIRTVMVTGDSMLTAVSVARDCGMILPQDKVIIAEALPPKDGKVAKINWHYADSLTQCSHPSAIDPEAIPVKLVHDSLEDLQMTRYHFAMNGKSFSVILEHFQDLVPKLMLHGTVFARMAPDQKTQLIEALQNVDYFVGMCGDGANDCGALKRAHGGISLSELEASVASPFTSKTPSISCVPNLIREGRAALITSSCELALFSIVTYSLDHFIISILISSMLVLFFSDFHNCAFYSLV

SEQ ID NO: 2192 - DNA, 1274 bp, Homo sapien
  Unsure 1243: Unknown base
  Unsure 1270: Unknown base
cctgccgttggcggcctgagtccgcagcgccctgckccacccgccccggacgtggggcccaagcccccgtgaagatggtgtcctggatgatctccagagccgtggtgctggtgtttggaatgctttatcctgcatattattcatacaaagctgtgaaaacaaaaaacgtgaaggaatatgttcgatggatgatgtactggattgtttttgctctctatactgtgattgaaacagtagccgatcaaacagttgcttggtttcccctgtactatgagctgaagattgcttttgtcatatggctgctttctccctataccaaaggagcaagtttaatatatagaaaattccttcatccacttctttcttcaaaggaaagggagattgatgattatattgtacaagcaaaggaacgaggctatgaaaccatggtaaactttggacggcaaggtttaaaccttgcagckactgctgctgttactgcagcagtaaagagccaaggagcaataactgaacgtttaagaagcttcagtatgcatgatttaacaactatccaaggtgatgagcctgtgggacaaagaccataccaacctctaccagaagcmaaaaagaaaagtarccagcccccagtgaatcagcmggttatggaattccactgraagacggrgatgwgraaacagatkaagaagcagaggggccatattcagataatgagatgttaacacacaaagggcttcgaagatcgcaaagcatgaaatctgtgaaaaccaccaaaggccgcaaagaggtgcggtacgggtcactaaaatacaaagtgaagaaacgaccacaagtgtatttttagtcatctacacgtcaaatatcccaagacagattatgctaaatacatcgacttcatcttctaacatgatatattcaggatttacacattaaaatgattatttaaattgtggcagtgatggggtttactttcatgaatttaaattgtttttatttcctgtaacaattgcttccaaatattgactactaaaggcagttctgcaagatgtactaaatatgtatattagaaattatagaaaatcatgttgtccgttttcaaattcatcaacagcctagagtgcctgagatataagatgaaacacaaatccacagtatacttgaaaggagcctttttacggttcaggataaatcagcctttgtgatgtactgtgtttacctccttttgtgttgtatctggtaattaaantagggcccagattcagcaagtgacatnacaa

SEQ ID NO: 2193 - protein, 214 aa, Homo sapien
  unsure 181: unknown amino acid
  unsure 188: unknown amino acid
  unsure 194: unknown amino acid
  unsure 197: unknown amino acid
  unsure 199: unknown amino acid
  unsure 202: unknown amino acid
MVSWMISRAVVLVFGMLYPAYYSYKAVKTKNVKEYVRWMMYWIVFALYTVIETVADQTVAWFPLYYELKIAFVIWLLSPYTKGASLIYRKFLHPLLSSKEREIDDYIVQAKERGYETMVNFGRQGLNLAATAAVTAAVKSQGAITERLRSFSMHDLTTIQGDEPVGQRPYQPLPEAKKKSXQPPVNQXVMEFHXKTXMXKQXKKQRGHIQIMRC

SEQ ID NO: 2194 - DNA, 1138 bp, Homo sapien
tctacctcctagcaagtactttgtcttgatcctcactgagaaggccccagggcagcggtcttctccatctccgctgttttggggtcttagggtacagcccaggcggtcactgcccacctgccaggctgcagggacagttgggtgtgagaataacactggctttgggtagtgccatggccaggagtgggtttccctgcgtctcctcgtcccgagggcgcctgggtcctcccagctgacggcagtaaatccacagtgagttggggcgactgtgaaactggaatgctgttactttgataattactttccagcaggtgttttccttcacaatggttttgtttctttccttctgatctgagaagacatgaacgttttctcttcaccgccgtggggtgtattgactggtcccccatgggctgctggaaaggcccggagatgcatctgtggcctggggccatcaagatcaaagaaccaggaggcctgggagatgcagctggatggggcggcctgcagaccctgccagggggtttgaggaccctcccaggtttcccactgcggaacaggagtgactctggctgccaagataccttcatggtgttcatgacaagtggaatcattattttcaaccattgaagggggatgcaggcaagacaccttcccagctgctcctagaggggacaagccaggccctctctgcagtcctcggcagctccggaaggacacagtcaggggccgggcaaacactttggccacagccccaaacaagcgccaccgtgggagaggagaggctgctgtcactggtaccggatgcagaccccaccctgtctgcaggccacccccacctccctgcagctttgaggctggcggggtctgctcctgggaatggggtgggagccacagggacgacccgggggcgggctgatgtcttcttgggggcagaccagagagctcaagtttcagagtcagaattaggcacttggagcgtttttgctggcttgcactttcttattttcttattttagagcgcttaaaaaatccggaaaaatggggtttaaaagaactgtctctttcagtctacatttttgtttaatacgcttgagcaataaacgctgacttgcagacgtgaaaaaaaaaaaaaaaa

SEQ ID NO: 2195 - protein, 65 aa, Homo sapien
MHLWPGAIKIKEPGGLGDAAGWGGLQTLPGGLRTLPGFPLRNRSDSGCQDTFMVFMTSGIIIFNH

SEQ ID NO: 2196 - DNA, 315 bp, Homo sapien
cccaaggctgccccctcggtcactctgttcccaccctcctctgaggagcttcaagccaacaaggccacactggtgtgtctcataagtgacttctacccgggagccgtgacagttgcctggaaggcagatagcagccccgtcaaggcgggggtggagaccaccacaccctccaaacaaagcaacaacaagtacgcggccagcagctacctgagcctgacgcctgagcagtggaagtcccacaaaagctacagctgccaggtcacgcatgaagggagcaccgtggagaagacagttgcccctacggaatgttcatag

SEQ ID NO: 2197 - protein, 104 aa, Homo sapien
PKAAPSVTLFPPSSEELQANKATLVCLISDFYPGAVTVAWKADSSPVKAGVETTTPSKQSNNKYAASSYLSLTPEQWKSHKSYSCQVTHEGSTVEKTVAPTECS

SEQ ID NO: 2198 - DNA, 2894 bp, Homo sapien
agcactttcattggacgagccaatcatttcttcactgtaactgaccccaggaacattctgttaaccaacgaacaactcgagagtgcgagaaaaatagtacatgattacaggcaaggaattgttcctcctggtcttacagaaaatgaattgtggagagcaaagtacatctatgattcagcttttcatcctgacactggtgagaagatgattttgataggaagaatgtcagcccaggttcccatgaacatgaccatcacaggttgtatgatgacgttttacaggactacgccggctgtgctgttctggcagtggattaaccagtccttcaatgccgtcgtcaattacaccaacagaagtggagacgcacccctcactgtcaatgagttgggaacagcttacgtttctgcaacaactggtgccgtagcaacagctctaggactcaatgcattgaccaagcatgtctcaccactgataggacgttttgttccctttgctgccgtagctgctgctaattgcattaatattccattaatgaggcaaagggaactcaaagttggcattcccgtcacggatgagaatgggaaccgcttgggggagtcggcgaacgctgcgaaacaagccatcacgcaagttgtcgtgtccaggattctcatggcagcccctggcatggccatccctccattcattatgaacactttggaaaagaaagcctttttgaagaggttcccatggatgagtgcacccattcaagttgggttagttggcttctgtttggtgtttgctacacccctgtgttgtgccctgtttcctcagaaaagttccatgtctgtgacaagcttggaggccgagttgcaagctaagatccaagagagccatcctgaattgcgacgcgtgtacttcaataagggattgtaaagcagggaggaaacctctgcagctcattctgccactgcaaagctggtgtagccatgctggtgagaaaaatcctgttcaacctgggttctcccagttacggaaaccttttaaagatccacattagccttttagaataaagctgctactttaacagagcacctggcgtgggccaagtgcctgatactcccttacactgaatcatgttatgatttatagaaatacctttcctgtagcttttatagtcattgtttttcaaagacgatataccagccctcacccaggttttaaaaaagcactggtaggcatagaataggtgctcagtatatggtcagtaaatgttctattgattatcaatcagtgaaaaaagaaatctgtttaaaatactgaattttcatctcactcccattgcaaatcaaggagatctcagcagtgaactgggaaaatacaaaagctctgggctaatctataaaaacttaccctgaaatattaagggcagtttgcttctagtttggggattgcgctagcccaatgaaggtgatgaagcttttggatttggagggtaaaagctccttcacaccccttccaaaagtcagtcacagaccactgcaacatgccttccctgctggatcattatatacattcagattgtgagtggattgccttggttgacttttaatttattgttttttgttcttataaagatgataatcttaccttgcagttattgactttatattcaattatttacatcaaataatgaaataactgaaatgtacaaatgtcaaattttggaagtatattcaataccaatgctgtatgagtgggctgaatccagttcattgttttttttttggtaagaagtgagactacagttccagctacctacatgtcttttcttgtcatccttatagatctctttggctttcagaaagatacagtgataatgtgtgtatgaatcagtcacaatgaattttacttgaatattgtatgttgcattccacttcatttgaaaataatgaaaccatgtaccactgtttacatcatctgtagtgatttcatagataatatatttaatatgacagattatgtttcaactctgtagatgtttaacgtcatagacagttggccctctgtatccgtgagctctatatctgtgaattcaaccaagtttggatggaaaattttttttttttttttttttttgagacggagtctcgctctgtcacccaggctggagtgcagtggcgtagtctcggctcactgcaagctccgcctcctgggttcacgccgttctcctgcctcagcctctctgagaagctgggactacaggcgcccgccaccacgcccggctaatttttttgtatttttagtagagacggggtttcactgtggtctcgatctcctgacctcgtgatccgcccgccttggcctcccaaggtgctgggattacaagcgtgagccaccgcacccggcctgaaaatattttctaaaaagataaaaaatatacataacgatgaaaaataatacaaatttaaaaaccaatacagtataacaactatttacatagtgcttacattgtattaggtgttataagcaatctagagatgatttagcaagtatacaggaggatgtgcctaggttatatgcaaatactgtgccattttatatcaggaacttgagcatctgcagatattggtatcggagggcggtcctggaaccaagcatccacggatactgaggggtgacatttcatgaagtgtagatcattgtattcagagattgtaaatgaaaaaaatatagaaactatttagttttggtagattttttttctgacaatgtgaccagactgaatttcctcataaagaaaaaatggcgtgccttgtgtctgtgtttctcttttctctgaaaggattaatagatctgaagctttgggccacttagagccttaaaaaaaaaaaaaaaaaaaaaaaaaaaaaaaa

SEQ ID NO: 2199 - protein, 236 aa, Homo sapien
MILIGRMSAQVPMNMTITGCMMTFYRTTPAVLFWQWINQSFNAVVNYTNRSGDAPLTVNELGTAYVSATTGAVATALGLNALTKHVSPLIGRFVPFAAVAAANCINIPLMRQRELKVGIPVTDENGNRLGESANAAKQAITQVVVSRILMAAPGMAIPPFIMNTLEKKAFLKRFPWMSAPIQVGLVGFCLVFATPLCCALFPQKSSMSVTSLEAELQAKIQESHPELRRVYFNKGL

SEQ ID NO: 2200 - DNA, 710 bp, Homo sapien
gcgaaagagaaaaaggctggagctcccgcccccggggctgtcagatggcttgggtttctgcgacgcgattggctcgcggagggcagaaattactcagcaaacatgactattattagctgcttagcaacagctcaccaaagtagagagaccacccaggtaggcaacccagtgtgtgcatcctcggcttcggggcagcctctgagagcgccaaccttctcgcatgcaatacttccattaaggaatgctccccctcctttctctcttattccttttcttttcaacagtgtcttctttttgtgggatgcctttgcgcgcacacacgcgcgcgcasgcacacacacgaacatttgcctcgcggtagacacggggggaaatgtwatatttttttaagcgcttaaacaatttctgaaattcctcaaagaaaagcctttcagargcaccttggcctcaagctgcaacaaatactgggargtccggctcgcattcccaggcctgcaccaataatgacagcgtgctggatartgcgccagtgtgtgccagatttttttttcctcttctcttttcttttataactaaagggaagacttaggctcttgcagggaacaacgcctcgcattaagataaacagaatggaaagttaaagaggaaagcaaggacgttgggaaaagccatctttcttaaaatccgtctgccccccagccgctttctcc

SEQ ID NO: 2201 - protein, 95 aa, Homo sapien
  unsure 77: unknown amino acid
MTIISCLATAHQSRETTQVGNPVCASSASGQPLRAPTFSHAILPLRNAPPPFSLIPFLFNSVFFLWDAFARTHARAXTHTNICLAVDTGGNVIFF

SEQ ID NO: 2202 - DNA, 817 bp, Homo sapien
catccatccaaatttgaagatcctatattagttcctcttcaagaatttgcatggcatcaatatctacaggagaaaaaaagggaactcaaaaatgaaacctgggaatattcttcctctgtgatttcttttgttaatggtcagtttctgggtgatgcattggatctgcagaaatgggcccacgaggtgtgggatatagttgacattaaaccctctgcactttatgacgcactcactgaggatttttccgctaagttcttaagagacaccaagctatactgtgatgtgtgtcccaaaacatgtaaaaattttcaggtcttgtgcacaggaaaagcagggttttctcaacgtggcataagactacattacaaaaattccatttttcatcgaatagtacagaatggctggatacaaggaggggatatagtgtatggaaaaggagataatggagagtcgatttatggtccaacatttgaagatgaaaacttttcagttcctcataataaaagaggagtacttggaatggccaacaaaggccgtcacagcaacgggtcacaattctatatcacactgcaagcaactccttatctagatagaaaatttgtggcttttgggcaactgattgaaggaacagaagtgcttaaacaactagaattagttccaacacagaatgaaagaccaatacatatgtgtagaattactgacagtggagatccttatgcttgattttcatatcaatattttctgtgataatttattactttgtatctgatcagctgtttgtggatttaattaaaaagtacttgataaattgtaaaaa

SEQ ID NO: 2203 - DNA, 306 bp, Homo sapien
gcccacgcgtccgcccacgcgtccggccctgcagacaagcgtgccgtgcgtgcttgtggccaagggaaggaagagctggttgatccacagatagctccttcctccccgccccttcctttttgtttggaggtcccaggatctgtgttcacagacatctgggggaagaaaaggagcaggaaactaccccgcacagagttaagcaggaaacaacaacaacatcatgcaaaaaccctgcaaagaaaacgaaggaaagccaaagtgcagcgtgccaaagagggaggaaaaacgcccgtatggagaatttga

SEQ ID NO: 2204 - protein, 101 aa, Homo sapien
AHASAHASGPADKRAVRACGQGKEELVDPQIAPSSPPLPFCLEVPGSVFTDIWGKKRSRKLPRTELSRKQQQHHAKTLQRKRRKAKVQRAKEGGKTPVWRI

SEQ ID NO: 2205 - DNA, 520 bp, Homo sapien
acttcagttgggctgaggcggaggagccgccgcttctgacctcgctctggctccggtgcgcgcggctgagcgcgtgcgaggccccgcgcgtcgggcaggggcggcggcggccactgcgcgccgccctgaggagcgccccagcggcggcgcgactgcggctgaggagagagccggctccgggcctccgcgtcctcctgctcccccggccccccgcctcctcgggggggcggcggcgactacggactggtgacggccggctgcggcttcgggaaggacttccgtaagggcctcctcaagaagggcgcgtgctacggggacgacgcgtgcttcgtggcccggcaccgttccgcggacgtgctcggggttgcagatggtgtaggaggctggagagactatggagttgatccatctcaattctcagggactttaatgcggacgtgtgaacgtttagtaaaagaaggacggttcgtacctagtaatcccattggaattctcaccacaagctactgtgagttgctgc

SEQ ID NO: 2206 - DNA, 7002 bp, Homo sapien
ttaaataagtagggattgtttaaaaaaaaagctgtaatatgttatctgggggtggatgatcctggtgttagttaaagctctcagtgatgtctgtgctgggacttccgggttcctgttggacttttcctcccaaacttcaccaggaactgacaatggcgaagcccttcccgaatccatcccatcagctcctgggacactgcctcatttcatagaggagccagatgatgcttatattatcaagagcaaccctattgcactcaggtgcaaagcgaggccagccatgcagatattcttcaaatgcaacggcgagtgggtccatcagaacgagcacgtctctgaagagactctggacgagagctcaggtttgaaggtccgcgaagtgttcatcaatgttactaggcaacaggtggaggacttccatgggcccgaggactattggtgccagtgtgtggcgtggagccacctgggtacctccaagagcaggaaggcctctgtgcgcatagcctatttacggaaaaactttgaacaagacccacaaggaagggaagttcccattgaaggcatgattgtactgcactgccgcccaccagagggagtccctgctgccgaggtggaatggctgaaaaatgaagagcccattgactctgaacaagacgagaacattgacaccagggctgaccataacctgatcatcaggcaggcacggctctcggactcaggaaattacacctgcatggcagccaacatcgtggctaagaggagaagcctgtcggccactgttgtggtctacgtgaatggaggctggtcttcctggacagagtggtcagcctgcaatgttcgctgtggtagaggatggcagaaacgttcccggacctgcaccaacccagctcctctcaatggtggggccttttgtgagggaatgtcagtgcagaaaataacctgcacttctctttgtcctgtggatgggagctgggaagtgtggagcgaatggtccgtctgcagtccagagtgtgaacatttgcggatccgggagtgcacagcaccacccccgagaaatgggggcaaattctgtgaaggtctaagccaggaatctgaaaactgcacagatggtctttgcatcctagataaaaaacctcttcatgaaataaaaccccaaagcattgagaatgccagcgacattgctttgtactcgggcttgggtgctgccgtcgtggccgttgcagtcctggtcattggtgtcaccctttacagacggagccagagtgactatggcgtggacgtcattgactcttctgcattgacaggtggcttccagaccttcaacttcaaaacagtccgtcaaggtaactccctgctcctgaattctgccatgcagccagatctgacagtgagccggacatacagcggacccatctgtctgcaggaccctctggacaaggagctcatgacagagtcctcactctttaaccctttgtcggacatcaaagtgaaagtccagagctcgttcatggtttccctgggagtgtctgagagagctgagtaccacggcaagaatcattccaggacttttccccatggaaacaaccacagctttagtacaatgcatcccagaaataaaatgccctacatccaaaatctgtcatcactccccacaaggacagaactgaggacaactggtgtctttggccatttaggggggcgcttagtaatgccaaatacaggggtgagcttactcataccacacggtgccatcccagaggagaattcttgggagatttatatgtccatcaaccaaggtgaacccagcctccagtcagatggctctgaggtgctcctgagtcctgaagtcacctgtggtcctccagacatgatcgtcaccactccctttgcattgaccatcccgcactgtgcagatgtcagttctgagcattggaatatccatttaaagaagaggacacagcagggcaaatgggaggaagtgatgtcagtggaagatgaatctacatcctgttactgccttttggacccctttgcgtgtcatgtgctcctggacagctttgggacctatgcgctcactggagagccaatcacagactgtgccgtgaagcaactgaaggtggcggtttttggctgcatgtcctgtaactccctggattacaacttgagagtttactgtgtggacaataccccttgtgcatttcaggaagtggtttcagatgaaaggcatcaaggtggacagctcctggaagaaccaaaattgctgcatttcaaagggaatacctttagtcttcagatttctgtccttgatattcccccattcctctggagaattaaaccattcactgcctgccaggaagtcccgttctcccgcgtgtggtgcagtaaccggcagcccctgcactgtgccttctccctggagcgttatacgcccactaccacccagctgtcctgcaaaatctgcattcggcagctcaaaggccatgaacagatcctccaagtgcagacatcaatcctagagagtgaacgagaaaccatcactttcttcgcacaagaggacagcactttccctgcacagactggccccaaagccttcaaaattccctactccatcagacagcggatttgtgctacatttgatacccccaatgccaaaggcaaggactggcagatgttagcacagaaaaacagcatcaacaggaatttatcttatttcgctacacaaagtagcccatctgctgtcattttgaacctgtgggaagctcgtcatcagcatgatggtgatcttgactccctggcctgtgcccttgaagagattgggaggacacacacgaaactctcaaacatttcagaatcccagcttgatgaagccgacttcaactacagcaggcaaaatggactctagtccacttcctcccatgagacagagtgatggccagcttggggacatttgctttaaatgggaaagaggccgctttctgcccagtggcgttgggggaattcagccttcatttataatcagtgagattcccctgttgaagaaactaaattttatataggtaaaacatgttaatagggaagagtacaagctctcttacatataagagggctctactatctccttggaatccacatttgggttaactcctcagatttggagtggcaaggataaaagtgagggcagaagtagctgtgggaaaagatgagctatgataatgctgggaaggcagagattgattaagtgcatgctttgaaataggtttttaatgatgtgccccaaagggccagctgattctggtactagattgtcagagttttctaccaactggcatctgtgatgtcagagatcattgtaaaaatggcttttagacgtgaaacagggttgccaacccatttgtatgacttcaacaacgtcaaggagggcatttagaatttagaatctgagcacatcacaccagcaccagctccctgtctcttctagccacttaatggagacacaatggagaggtaagacagaccacaaactagttcttatagtgtactccaccttttacttttttcctgagacaaatctacccttattctttcttcctcttccttaccccttgcagtagggaggtatcaaggagcataattaaacttgtcaatacggaaagttgttttttctaacacaacaaagtgggaccatctctattcccatctaagccactcaaattgctgagtgctattagaacacagcttattacatggatatggggacaggagagattaaagcaggttcaaaaacacatgaactgcagatgccataggcctcaaatcagctgtaattctaggagacacgtgttgatctagttatctaacattgttgttataagaaaatgagtttactgcatttttcaatccagattcttgaaattgtctaacatgtgggtactgtgtcatcacaaaatctctcagtaaggctatatgtgatcctcattttgcctcttgggaaattagcagatagtctttgctctaaatgatatctgagtaaatagacttgaggaatcctctaccacagtgtccctgaaaccacatgcatcattcaggaagccttcaccctgtgactattcagcctccctgaatatgctttctctatagaaccactaacatatggctattgctctatgattttttttttttacattaggaggcagtgatattgtggaagattgaaatccacagataattcatgaccctcatcttatcactttactccatctttttatcctattaaattatttttgacaagatgtcctggtagactaaaggtgaacagatttgctcttgctcatcttctggtggatattttaacttgctattcacaatcaggacaaccaaagtcaaggacccagatgaaccacaaggcagctagtcagctacttagaggttggttacattcgaataaaaagtagtcagggaatgggggaggtggggagttggggagtacttggcagttgggatatgatccatttttttaaacaagttttttgtagatcccttgtaaaataataataataatgttgtgaatctccatgccaagtgaaaaaggcctaaagatgagttgaatttgtgataccatgggtaaggcatggaagaactcttgaatgtgttggccattttctctaactaacatgtggtatgtatggtcccctatattagatagaagtctttgctacatgtaattcaaaagcatctcgcttttctcaggaaccaaaggcttatgatgtaggacaaagaaatcatcttagaactgtcaagcatattttcacaataccatgtcaagatcaggaaaacacccttttgctagtgtgcttaacttatttatttcttctaggaaacaatagataaacagcatgaaaatgtaaatcatctggcatcactgatagaatttctgaaagagaaagagaagtagatggtcaaccagtcactagttggttggcatgaggtggtgtgcagaggaaagctgcattcactattgagtaaaaacttgtagaaagcacattatagagcttatgttggaatccatcttggaggatttttgttttaaactgtctttagcattttccctcttcccttctaatgggcattataattgtttcatctactctgtgaatctacataggtctttttttttagatgtttgatacattttaagtatttttaaatagatgaaaattctaaatgattttccctcaaatctatctagattattttaagatgagacaagattattgtcaatccctgaatgtctggagttacctcccatggatttttttttcctttggcctgggttttataaacaacttgaacatcatatcatataggataacaaaggaggaagttaacttaattcacctcagacttcagcctaagattcaatcaaattcatccttcagcctgtcttgtttcttctttatgtttcttttacttattgctgctaggatcctacataggatttctatagaaatgtatgaaattctgtggtcactgcatgtcaggattgcacagtatgttacaatacaatttcaaagagaacccacatttgtgagatttacagaccaaggtgtggtggaggaggtagaattgcagatcagataaaaagtgagcttacacttgaacttagttattcactgtgacctaaatttagtcctattgtaatatgtgcctgtcacaacacaaatacccctcttgaaagagatttactcatctatccaagcacttaatttggaaattttattgtcctattgcaaaatgaaacaaaattaaaagtggcctcgagtacttggtaagttacttaaaatttttacaaaaatatcccactcaatgccaaatctttcagtcctcaaaggcatttaagtccaatagtcatgctttaaatatggctttaaattatgccaccaaaatggtgcacttcacagattcaccagactgtagcatcataaagttaatttacagtttttacaacattgcttctacattcttactggtttacattaaaatcctttaagccaaaaggaagcttgctctatggatttaaatgcaaacttcatttaccagtgcaggaagtctcataaaactcagatgtactcccacaaaaattttattggcctttttgtaagagatgaaaaagaattgacacagttctctttaaagagaagaacttttttattattatttttatctccaactgcaggtggtgtcttttgccaaggtctctgtatttttctttcagttgtctttgggaggggatgttaagtcaaatcactaaaacagggttctctttggattaaaagttctggatttattgcaactattttccttgagaaacattctcagcatcaggattgataaacaaatgtagatgattaaaataggataattggttttagataatatcttctactgccaaacttctggcaaatttacctgtgaatttcaaaatgttataaaatctcttgatatgcttttgtttttccttttagccattttctcttcaatttcttagtccctctgccctctgtaaatgtgttgagtgatatagctatcagatgtattgaaggcaaagttctcgcagaggtctctgttccagctctgtaaaggtcacaggaatcgtgaaggagctgagaaatcttcctctccggcccactgtctgtggcccattgtcattgtttcctcatgaaacattgcagagtttgaatcctcagtaactctcattgactggattagaggtgatggccacagcaaatgggagagcaaaatgttggcctacagagaatgacacaattttattcgcctttggtgttagttgccatagtgctgtatttgaaaatcgatgctttagccaaaagctgaatgaccaccgtttccgtagtttccactgttttgtctgcatagaattttcctgaactacaagcaaaaatgtattttgtccaatgtcacaaaagtgaaaatgttactaatctt

SEQ ID NO: 2207 - protein, 948 aa, Homo sapien
MILVLVKALSDVCAGTSGFLLDFSSQTSPGTDNGEALPESIPSAPGTLPHFIEEPDDAYIIKSNPIALRCKARPAMQIFFKCNGEWVHQNEHVSEETLDESSGLKVREVFINVTRQQVEDFHGPEDYWCQCVAWSHLGTSKSRKASVRIAYLRKNFEQDPQGREVPIEGMIVLHCRPPEGVPAAEVEWLKNEEPIDSEQDENIDTRADHNLIIRQARLSDSGNYTCMAANIVAKRRSLSATVVVYVNGGWSSWTEWSACNVRCGRGWQKRSRTCTNPAPLNGGAFCEGMSVQKITCTSLCPVDGSWEVWSEWSVCSPECEHLRIRECTAPPPRNGGKFCEGLSQESENCTDGLCILDKKPLHEIKPQSIENASDIALYSGLGAAVVAVAVLVIGVTLYRRSQSDYGVDVIDSSALTGGFQTFNFKTVRQGNSLLLNSAMQPDLTVSRTYSGPICLQDPLDKELMTESSLFNPLSDIKVKVQSSFMVSLGVSERAEYHGKNHSRTFPHGNNHSFSTMHPRNKMPYIQNLSSLPTRTELRTTGVFGHLGGRLVMPNTGVSLLIPHGAIPEENSWEIYMSINQGEPSLQSDGSEVLLSPEVTCGPPDMIVTTPFALTIPHCADVSSEHWNIHLKKRTQQGKWEEVMSVEDESTSCYCLLDPFACHVLLDSFGTYALTGEPITDCAVKQLKVAVFGCMSCNSLDYNLRVYCVDNTPCAFQEVVSDERHQGGQLLEEPKLLHFKGNTFSLQISVLDIPPFLWRIKPFTACQEVPFSRVWCSNRQPLHCAFSLERYTPTTTQLSCKICIRQLKGHEQILQVQTSILESERETITFFAQEDSTFPAQTGPKAFKIPYSIRQRICATFDTPNAKGKDWQMLAQKNSINRNLSYFATQSSPSAVILNLWEARHQHDGDLDSLACALEEIGRTHTKLSNISESQLDEADFNYSRQNGL

SEQ ID NO: 2208 - DNA, 832 bp, Homo sapien
gaaacaatgattgccaggaaggtcactttcagcacccacagcctcggcaaccagcacatataccagcgaagctcctccatgttgtccttcagcaacactgacaagaaggccaaggtgggtctggaggcctgtgggagagcccagtcagccacccccgccaaacccacagacggcctctacacctactggagtgctggagaagacagccagtctgtacagaacagcagcagcttccacaactggtactcattcaacgatggctctgtgaagaccccaggcccaattgttatctaccagactctggtgtacccaagagctgccaaggtttactggacatgtccagcagaagacgtggactcttttgagatggaattctatgaagtcattacttctcctcctaacaacgtacaaatggagctctgtggacaaattcgggacataatgcagcaaaatctggagctgcacaacctgacccccaacacagaatacgtgtttaaagttagagccatcaatgataatggtcctgggcaatggagtgatatctgcaaggtggtaacaccagatggacatgggaagaaccgagctaagtggggcctgctgaagaatatccagtctgccctccagaagcacttctgagccccttcagagcaggaaacaacctcagactcatcacaaagtagacatatacacacacatatatgtatgtatatttttctcaccacattcttcaaggaggttgtagacaaatgtttccatgacctctcagctttccaacaggaatcttgtaagagctaataaaaggaaatacctgaaaaaaaaaaaaaaaaaaaaa

SEQ ID NO: 2209 - protein, 211 aa, Homo sapien
ETMIARKVTFSTHSLGNQHIYQRSSSMLSFSNTDKKAKVGLEACGRAQSATPAKPTDGLYTYWSAGEDSQSVQNSSSFHNWYSFNDGSVKTPGPIVIYQTLVYPRAAKVYWTCPAEDVDSFEMEFYEVITSPPNNVQMELCGQIRDIMQQNLELHNLTPNTEYVFKVRAINDNGPGQWSDICKVVTPDGHGKNRAKWGLLKNIQSALQKHF

SEQ ID NO: 2210 - DNA, 645 bp, Homo sapien
atggacgtcaggctcatctgcaccaccgtacccaagatggccttcaactacttgtctggcagcaagtccatttctatggctggctgtgccacacaaattttcttctgtgtatcactgcttggctctgaatgctttctgttggctgttatgtcttatgactgctacattgccatttgccaccctctaagatacaccaatctcatgagacccaaaatttgtagacttatgactgccttctcctggatcctgggctctacagatggaatcatttatgctgtagccacattttccttctcctactgtgggtctcgggaaatagcccacttcttctgtgagttaccttccctactaatcctctcatgcaatgacacgtcaatatttgaaaaggttattttcatttgctctatagtaatgcttgttttccctgttgcaatcatcattgcttcctatgctggagttattctggctgtcattcacatgggatctggagagggtcgtcgcaaagctttcacgacctgttcctctcacctcatggtggtgggaatgttctatggagcaggtttgttcatgtacatacagcccacatctgatcgctccccaacgcaggacaagctggtgtctgtattctacaccatcctcactccc

SEQ ID NO: 2211 - DNA, 1557 bp, Homo sapien
tgtctgcacagacagcaccatgtcgctcatggtcgtcagcatggcgtgtgttgggttcttcttgctgcagggggcctggccacatgagggagtccacagaaaaccttccctcctggcccacccaggtcccctggtgaaatcagaagagacagtcatcctgcaatgttggtcagatgtcaggtttgagcacttccttctgcacagagaggggaagtataaggacactttgcacctcattggagagcaccatgatggggtctccaaggccaacttctccatcggtcccatgatgcaagaccttgcagggacctacagatgctacggttctgttactcactccccctatcagttgtcagctcccagtgaccctctggacatcgtcatcacaggtctatatgagaaaccttctctctcagcccagccgggccccacggttttggcaggagagagcgtgaccttgtcctgcagctcccggagctcctatgacatgtaccatctatccagggagggggaggcccatgaacgtaggttctctgcagggcccaaggtcaacggaacattccaggccgactttcctctgggccctgccacccacggaggaacctacagatgcttcggctctttccgtgactctccctatgagtggtcaaactcgagtgacccactgcttgtttctgtcacaggaaacccttcaaatagttggccttcacccactgaaccaagctccaaaaccggtaaccccagacacctgcatgttctgattgggacctcagtggtcaaaatccctttcaccatcctcctcttctttctccttcatcgctggtgctccaacaaaaaaaatgctgctgtaatggaccaagagcctgcagggaacagaacagtgaacagcgaggattctgatgaacaagaccatcaggaggtgtcatacgcataattggatcactgtgttttcacacagagagaaatcactcgcccttctgagaggcccaagacacccccaacagataccagcatgtacatagaacttccaaatgctgagcccagatccaaagttgtcttctgtccacgagcaccacagtcaggccttgaggggatcttctagggagacaacagccctgtctcaaaaccgggttgccagctcccatgtaccagcagctggaatctgaaggcatcagtcttcatcttagggcatcgctcttcctcacaccacgaatctgaacatgcctctctcttgcttacaaatgtctaaggtccccactgcctgctggagagaaaacacactcctttgcttagcccacaattctccatttcacttgacccctgcccacctctccaacctaactagcttacttcctagtctacctgaggctgcaatcacactgaggaactcacaattccaaacatacaagaggctccctcttaacacagcacttagacacgtgctgttccacctcccttcagactatctttcagccttctgccagcagtaaaacttataaattttttaaataatttcaatgtagttttcccgccttcaaataaacatgtctgccctca

SEQ ID NO: 2212 - protein, 304 aa, Homo sapien
MSLMVVSMACVGFFLLQGAWPHEGVHRKPSLLAHPGPLVKSEETVILQCWSDVRFEHFLLHREGKYKDTLHLIGEHHDGVSKANFSIGPMMQDLAGTYRCYGSVTHSPYQLSAPSDPLDIVITGLYEKPSLSAQPGPTVLAGESVTLSCSSRSSYDMYHLSREGEAHERRFSAGPKVNGTFQADFPLGPATHGGTYRCFGSFRDSPYEWSNSSDPLLVSVTGNPSNSWPSPTEPSSKTGNPRHLHVLIGTSVVKIPFTILLFFLLHRWCSNKKNAAVMDQEPAGNRTVNSEDSDEQDHQEVSYA

SEQ ID NO: 2213 - DNA, 3655 bp, Homo sapien
ccggcttttgcgctgggagcccagagcaggaggcagagcccgcgggaagctcggagcactcaggacgccgcgcgcccttccccgccctccctgaccagggagcagctcgctccaggcgcccagccgaggcccccagcccagtgggagcaagtcatagagaacaattcgagagacagagagacggagcgcgctttcctgctcagtcctgaaaagtgagccgctcccgggtttgcaacctcaagcttcgcagcagcggcggcggcggctgccgggaaggaggcaggtgcaggtgcaggagggaggcggctctgggctccgcgcctgggtcttggccatggcctcggtcctggggagcggcagagggtctggagggctgagcagtcaactcaaatgcaagtccaagaggaggaggaggcggaggtccaagcggaaagataaagtaagcatattgtcaaccttcctcgctcctttcaagcacctgagtcctggcatcacaaacacggaggatgacgacaccctcagtaccagcagcgcggaggtgaaggagaaccgcaacgtgggcaacctggccgcgcggccaccgccctccggggaccgggcccggggcggcgcgcccggcgcgaagaggaagcggccgctggaggaggggaatgggggccacttgtgcaaactgcagctggtctggaagaagctgtcgtggtcggtggcgcccaagaacgcgctggtgcagctgcacgagctgaggccgggcctgcagtaccggacagtgtcgcagacgggcccggtgcatgccccggtcttcgcggtagcggtggaggtgaacgggctcacgttcgagggcacaggccccaccaagaagaaggccaagatgcgcgcggcggagctggcactcaggtccttcgtgcagttccccaacgcctgccaggcgcacctggccatgggcgggggcccgggccccggcacggacttcacctccgaccaggccgatttccccgacacgctcttccaggagttcgagcccccggcgccgcgccccggactcgcgggaggccgccccggggacgccgcgcttctgtccgcggcctacgggcgacggcggctgctgtgccgcgcgctggacctggtgggcccgacccccgccacccccgcggccccgggcgagcgcaaccccgtggtgctgctgaaccgcctgcgcgccgggctgcgctacgtgtgtctggcagaaccggccgagcggcgcgcgcggagcttcgtgatggccgtgagcgtggacggcaggacgttcgagggctcggggcgcagcaagaagctggcccggggtcaggccgcgcaggccgcactgcaggagctgttcgacatccagatgcccggccacgcgcccggcagggccaggaggacgccaatgccgcaggaattcgcagactccatatcccagctggtcacacagaagttccgcgaggtgacgacggacctcacgcccatgcacgcccgccataaagcgctggcaggaatcgtcatgaccaaaggcctggatgctcggcaggcgcaggtcgtggccctgtcctcggggaccaagtgcatcagcggcgagcacctcagtgaccaggggctggtggtgaatgactgccacgcggaggtcgtggcccggcgggcgttcctgcacttcctctacacgcagctggagctgcacctgagcaagcggcgcgaggactcagagcgatcgatattcgtgcggttaaaagaaggtggctaccggctgcgagagaacatcctcttccatctctacgtgagcacctccccctgtggagacgcaagactccactctccctacgagatcaccacagacctgcacagcagcaaacacctcgtcaggaagttccgcgggcacctgcgcaccaagatcgagtccggggaagggacggtccccgtgcgtggccccagcgcagtgcagacctgggacggcgtcctgctgggggagcagctgatcaccatgtcctgcacggacaagatcgccaggtggaacgtcctggggctgcagggcgcgctcctgtcccacttcgtggagcccgtgtacctgcagagcatcgtggtgggcagcctgcaccacacgggccacctcgcacgcgtcatgagccaccgcatggagggtgtcggccagctgcccgcctcctaccggcacaaccggcctctcctcagcggcgtgagtgacgccgaggcgcgccagccggggaagtcgccccccttcagcatgaactgggtcgtgggcagcgcggacctggagattatcaacgccaccactgggcggaggagctgtgggggcccatcccggctctgcaagcacgtgctgtctgcacggtgggcgcggctgtatggcaggctgagcacacggacacccagccctggagacacgccctccatgtactgtgaggccaagctgggggcgcacacctaccagtctgtgaaacagcagctgttcaaggcctttcagaaggctggcctgggcacctgggtgaggaaaccaccggagcagcagcagtttctactgactctctaggctgcgggctcctggctgctggagctgagcgggacgctggagggatgggaccgtgtctggggggcgacgtggcgggtcggccggttccctgcattcgttttactttggtgtcccagaaacacgcgagtgtgcaatgtttggacgagcaacaacacaaattcagaacgtgcctctttccagatcgctggccccagaaccctgtcccccacacccaggggcacacgcaccgttgagttagcgccgactcttcctgtggagtctgagggaggggctccattcaggcaaaggggttttagctgcagccttggaaggaggcaccgacacgacaccaggcaggagtgagcctcaggccccgtccctgcaccccacccctgcgtgcgcctcttggtgatgctggggtctcactagcttgagggggcacatgaagataagccacaaatgaagagaaaagccatgcccaccccagccccagagaaaccaataagaatcctctattattttcactattcgtttaggtttttatactccacctcctttcaaaaaagatttaagatgtacgacattaccgaacacctaaaatagaaccagagaaacgaaagccattcccacaaagtgaaggaacagtttccaaaacccctgcgaggcagagttaagacctgtgacgtggggagcctggaaacacctggcccacgcgtgctgcagatgtggggagcctggaaacacccggcccacgcgtgctgcagatgtggggagcctggaaacacccggcccacgcgtgctgcagatgtggggagcctggaaacacccggcccacgcgtgctgtagatgtggggagcctggaaaaacctggcccacgcgtgctgcagatgtggggagcccggaaacacctggcccatgcctgttcagtccgtcatggcgtttggtttatggtggccgatactaagagccactgaggtctgggttgtgtgagggttagctaccaccctataacctccctaccaggtaataaggagaccaagtctttgatcaaattctgattttttaactaaattttcattagaaagcaagcacaaaataaaatcaaaacaacctttaccttca

SEQ ID NO: 2214 - protein, 739 aa, Homo sapien
MASVLGSGRGSGGLSSQLKCKSKRRRRRRSKRKDKVSILSTFLAPFKHLSPGITNTEDDDTLSTSSAEVKENRNVGNLAARPPPSGDRARGGAPGAKRKRPLEEGNGGHLCKLQLVWKKLSWSVAPKNALVQLHELRPGLQYRTVSQTGPVHAPVFAVAVEVNGLTFEGTGPTKKKAKMRAAELALRSFVQFPNACQAHLAMGGGPGPGTDFTSDQADFPDTLFQEFEPPAPRPGLAGGRPGDAALLSAAYGRRRLLCRALDLVGPTPATPAAPGERNPVVLLNRLRAGLRYVCLAEPAERRARSFVMAVSVDGRTFEGSGRSKKLARGQAAQAALQELFDIQMPGHAPGRARRTPMPQEFADSISQLVTQKFREVTTDLTPMHARHKALAGIVMTKGLDARQAQVVALSSGTKCISGEHLSDQGLVVNDCHAEVVARRAFLHFLYTQLELHLSKRREDSERSIFVRLKEGGYRLRENILFHLYVSTSPCGDARLHSPYEITTDLHSSKHLVRKFRGHLRTKIESGEGTVPVRGPSAVQTWDGVLLGEQLITMSCTDKIARWNVLGLQGALLSHFVEPVYLQSIVVGSLHHTGHLARVMSHRMEGVGQLPASYRHNRPLLSGVSDAEARQPGKSPPFSMNWVVGSADLEIINATTGRRSCGGPSRLCKHVLSARWARLYGRLSTRTPSPGDTPSMYCEAKLGAHTYQSVKQQLFKAFQKAGLGTWVRKPPEQQQFLLTL

SEQ ID NO: 2215 - DNA, 1242 bp, Homo sapien
atttcatgttatacttaataaaacaaaacatacctgtatacacacacattcactcacattgaagatgcaagatgaagaaagatacatgacattgaatgtacagtcaaagaaaaggagttctgcccaaacatctcaacttacatttaaagattattcagtgacgttgcactggtataaaatcttactgggaatatctggaaccgtgaatggtattctcactttgactttgatctccttgatcctgttggtttctcagggagtattgctaaaatgccaaaaaggaagttgttcaaatgccactcagtatgaggacactggagatctaaaagtgaataatggcacaagaagaaatataagtaataaggacctttgtgcttcgagatctgcagaccagacagtactatgccaatcagaatggctcaaataccaagggaagtgttattggttctctaatgagatgaaaagctggagtgacagttatgtgtattgtttggaaagaaaatctcatctactaatcatacatgaccaacttgaaatggcttttatacagaaaaacctaagacaattaaactacgtatggattgggcttaactttacctccttgaaaatgacatggacttgggtggatggttctccaatagattcaaagatattcttcataaagggaccagctaaagaaaacagctgtgctgccattaaggaaagcaaaattttctctgaaacctgcagcagtgttttcaaatggatttgtcagtattagagtttgacaaaattcacagtgaaataatcaatgatcactatttttggcctattagtttctaatattaatctccaggtgtaagattttaaagtgcaattaaatgccaaaatctcttctcccttctccctccatcatcgacactggtctagcctcagagtaacccctgttaacaaactaaaatgtacacttcaaaatttttacgtgatagtataaaccaatgtgacttcatgtgatcatatccaggatttttattcgtcgcttattttatgccaaatgtgatcaaattatgcctgtttttctgtatcttgcgttttaaattcttaataaggtcctaaacaaaatttcttatatttctaatggttgaattataatgtgggtttatacattttttacccttttgtcaaagagaattaactttgtttccaggcttttgctactcttcactcagctacaataaacatcctgaatgttttcttaaaaaa

SEQ ID NO: 2216 - protein, 231 aa, Homo sapien
MQDEERYMTLNVQSKKRSSAQTSQLTFKDYSVTLHWYKILLGISGTVNGILTLTLISLILLVSQGVLLKCQKGSCSNATQYEDTGDLKVNNGTRRNISNKDLCASRSADQTVLCQSEWLKYQGKCYWFSNEMKSWSDSYVYCLERKSHLLIIHDQLEMAFIQKNLRQLNYVWIGLNFTSLKMTWTWVDGSPIDSKIFFIKGPAKENSCAAIKESKIFSETCSSVFKWICQY

SEQ ID NO: 2217 - DNA, 1108 bp, Homo sapien
agcagtggcccaaagaggagcagcagacaagagtgcagtggtggctgccgccgcaccagcctcagtggcagatgacacaccaccccccgagcgtcggaacaagagcggtatcatcagtgagcccctcaacaagagcctgcgccgctcccgcccgctctcccactactcttcttttggcagcagtggtggtagtggcggtggcagcatgatgggcggagagtctgcttgacaaggccactgcggctgcagcctggccttccctgttggccaatgggatgacctggcggcggccatggcggtggacaaaagcaaccctacctcaaagcacaaaagtggtgctgtggccagcctgctgagcaaggcagagcgggccacggagctggcagccgagggacagctgacgctgcagcagtttgcgcagtccacagagatgctgaagcgcgtggtgcaggagcatctcccgctgatgagcgaggcgggtgctggcctgcctgacatggaggctgtggcaggtgccgaagccctcaatggccagtccgacttcccctacctgggcgctttccccatcaacccaggcctcttcattatgaccccggcaggtgtgttcctggccgagagcgcgctgcacatggcgggcctggctgagtaccccatgcagggagagctgcctctgccatcagctccggcaagaagaagcggaaacgctgcggcattgtgcgcgccctgccggcggcgcatcaactgcgagcagtgcagcagttgtaggaatcgaaagactggccatcagatttgcaaattcagaaaatgtgaggaactcaaaaagaagccttccgctgctctggagaaggtgatgcttccgacgggagccgccttccggtggtttcagtgacggcggcggaacccaaagctgccctctccgtgcaatgtcactgctcgtgtggtctccagcaagggattcgggcgaagacaaacggatgcacccgtctttagaaccaaaaatattctctcacagatttcattcctgtttttatatatatattttttgttgtcgttttaacatctccacgtccctagcataaaaaaaaaaaaaaaaaaaaaaaaaaaaaaa

SEQ ID NO: 2218 - protein, 198 aa, Homo sapien
MAVDKSNPTSKHKSGAVASLLSKAERATELAAEGQLTLQQFAQSTEMLKRVVQEHLPLMSEAGAGLPDMEAVAGAEALNGQSDFPYLGAFPINPGLFIMTPAGVFLAESALHMAGLAEYPMQGELPLPSAPARRSGNAAALCAPCRRRINCEQCSSCRNRKTGHQICKFRKCEELKKKPSAALEKVMLPTGAAFRWFQ

SEQ ID NO: 2219 - DNA, 2879 bp, Homo sapien
catttgctatgaatattctctataacaaagcaagacaaatttagcagcacttcattgcatctggatgggggagagagctggacaatttcttgctaacaagagatggttaactgccctcacctcagccgtgaattctgcacacctcgcatccggggcaacacctgcttctgctgtgacctctacaactgtggcaaccgggtggagatcactggtgggtactacgaatacatcgatgtcagcagttgccaagatatcatccacctctaccacctgctctggtctgccaccatcctcaacattgttggcctgttcctgggcatcatcactgccgctgtccttggaggctttaaggacatgaacccaactctcccagcactgaactgttctgttgaaaatacccatccaacagtttcttactatgctcatccccaagtggcatcctacaatacctactaccatagccctcctcacctgccaccatattctgcttatgactttcagcattccggtgtctttccatcctcccctccctctggactttctgatgagccccagtctgcctctccctcacccagctacatgtggtcctcaagtgcaccgccccgttactctccaccctactatccaccttttgaaaagccaccaccttacagtccctaaagaggaatgcctgctggctattgagattattgtggcttttgtatttctgcttcagtggaagtgtgtagggtacaaaatttaaagtgtgactcttatgcataaagttttacaatggcctgccaggctagggaaagatagggacgaagcttattcattattagtgcagagcaggggtggtcaggctgaacgcagcacagaagggcagctcacattctctaagcaagactggggagccagcccagcaagaagcttgtttggacttgcattaccctatgctccacctctgtattcagcagaagtgtggttgccatctttttcactttatgtaaaggagtgttgccctcgggcccttggcagattgccaccccagcacctaggttgaagcacctggtttataggccctatctttccctacccctaaagtcagtccctaaggacaatttcccagctgatggggctacacagtagttccaatacagagagttctggctaagattttgtttgcttgtgtctggatgttgaaaaagactgcccgtatctcttactccttccttctctgtgagtattgtaaaaatggctgttgtgatcactcagctcagcttttgttattggtacctcctaaagggaaaagtgcaatattcttgcatcttcagtagtggggaacaggatgtattgttccggaaacactgaaatacacagcaacatgtgagatgttttaagtagatcacttaggagacagtggttctactacatgttgcattattacaaaatacatttgctacaggagatataaatcttatggttgtaattcagagtttaaaaatgttataaattaggttcttgggtcgtgatatgaattgttactaatctttgtgactatttaatcttcaaatattgtgcttaaccccagcaatccgcacgtatcctgcaccccaccccaaaagagtcatctgtattttaatgccactggtcttatcggtccttttgtctgttgagaccagtcatgacagcattcaagattatgaaagtgttacaatgccgcttcaagtctgcaaaacctcaaacgtagccaacttgacaaatatttaagtgttacggcagatttaaaatccatctggcacaccgtggtaggtatttgtacagttcttttaattacacatagctttaaaccatcaacctgatgagtttaaagcttttgcacccatgccttcacttcagaatgaacaccttcattgtgatcttatgttaacctgagaattgatttaaaggaagattgataatcctatactttataacgtaaaaatacaggggctacaggagggtacctaattagacagttctccaaacacagaacacacactggaaaattttccggccaattttgctacctcccaacttgatggattagaggtagcgcatatgctggtgctcccatctaccttgtagacacttagccatcaagaatcaaggcacaagaagtgcactctctcattaacagtaaatgtttgcaagatattcagtttaactttcagcatcatgaatgttcttatccagattttgaatccgaaaaactataatccttttatgttatacaaaattactatgattttttacagttctgagcatattaaaattctactggatttcaaaaagagactaatacccaactgactaactaaacaaatatcaacttgtaatactcaatgaatttttttgccatttacatttgaccgttggctttagtgaatgtccatatttaattttttaaggcaccattacacagtttatcctacatttatcacatttcttaaagtgttaagattctatggctcatttctatgtatttttcttactttacaaaataacctgaaacagtatagattttgtaacacttaatttgagcagcttttttattacattgaattatataaagtgcatgttaccttagaaaaattagtatttgctgctttactcttttgcaaaacatttgctgtaatgaatggatttgtatttccaatatgtatcttgactgcattttgtaatatttactgctttattcctaattctgctttaaagtactgaactgggcatgaaacattaaaatattaatccagaaactgtataaactggatgttgcttaaaatctgtatcactgccatgttgaaaattcagactgcttttgtgatgtttcaaatgaataaaactatcctcccctcgtt

SEQ ID NO: 2220 - protein, 185 aa, Homo sapien
MVNCPHLSREFCTPRIRGNTCFCCDLYNCGNRVEITGGYYEYIDVSSCQDIIHLYHLLWSATILNIVGLFLGIITAAVLGGFKDMNPTLPALNCSVENTHPTVSYYAHPQVASYNTYYHSPPHLPPYSAYDFQHSGVFPSSPPSGLSDEPQSASPSPSYMWSSSAPPRYSPPYYPPFEKPPPYSP

SEQ ID NO: 2221 - DNA, 1865 bp, Homo sapien
ccacgcgtccggcaccggcagcaccatgttgctcatggtcgtcagcatggcgtgtgttgggttcttcttggtccagagggccggtccacacgtgggtggtcaggacaagcccttcctgtctgcctggcccagcgctgtggtgcctcgaggaggacacgtgactcttcggtgtcactatcgtcataggtttaacaatttcatgctatacaaagaagacagaatccacgttcccatcttccatggcagattattccaggagagcttcaacatgagccctgtgaccacagcacatgcagggaactacacatgtcggggttcacacccacactcccccactgggtggtcggcacccagcaaccccgtggtgatcatggtcacaggaaaccacagaaaaccttccctcctggcccacccaggtcccctggtgaaatcaggagagagagtcatcctgcaatgttggtcagatatcatgtttgagcacttctttctgcacaaagaggggatctctaaggacccctcacgcctcgttggacagatccatgatggggtctccaaggccaatttctccatcggtcccatgatgcttgcccttgcagggacctacagatgctacggttctgttactcacaccccctatcagttgtcagctcccagtgatcccctggacatcgtggtcacaggtccatatgagaaaccttctctctcagcccagccgggccccaaggttcaggcaggagagagcgtgaccttgtcctgcagctcccggagctcctatgacatgtaccatctatccagggagcggggagcccatgaacgtaggctccctgcagtgcgcaaggtcaacagaacattccaggcagatttccctctgggccctgccacccacggagggacctacagatgcttcggctctttccgtcactctccctacgagtggtcagacccgagtgacccactgcttgtttctgtcacaggaaacccttcaagtagttggccttcacccacagaaccaagctccaaatctggtaaccccagacacctgcacattctgattgggacctcagtggtcatcatcctcttcatcctcctcctcttctttctccttcatctctggtgctccaacaaaaaaaatgctgctgtaatggaccaagagcctgcagggaacagaacagccaacagcgaggactctgatgaacaagaccctgaggaggtgacatacgcacagttggatcactgcgttttcacacagagaaaaatcactcgcccttctcagaggcccaagacaccccctacagataccatcttgtacacggaacttccaaatgctaagcccagatccaaagttgtctcctgcccatgagcaccacagtcaggccttgaggacgtcttctagggagacaacagccctgtctcaaaaccgagttgccagctcccatgtaccagcagctggaatctgaaggcgtgagtcttcatcttagggcatcgctcctcctcacgccacaaatctggtgcctctctcttgcttacaaatgtctaggtccccactgcctgctggaaagaaaacacactcctttgcttagcccacagttctccatttcacttgacccctgcccacctctccaacctaactggcttacttcctagtctacttgaggctgcaatcacactgaggaactcacaattccaaacatacaagaggctccctcttgacgtggcacttacccacgtgctgttccaccttccctcatgctgtttcacctttcttcggactattttccagccttctgtcagcagtgaaacttataaaattttttgtgatttcaatgtagctgtctcctcttcaaataaacatgtctgccctccaa

SEQ ID NO: 2222 - protein, 444 aa, Homo sapien
MLLMVVSMACVGFFLVQRAGPHVGGQDKPFLSAWPSAVVPRGGHVTLRCHYRHRFNNFMLYKEDRIHVPIFHGRLFQESFNMSPVTTAHAGNYTCRGSHPHSPTGWSAPSNPVVIMVTGNHRKPSLLAHPGPLVKSGERVILQCWSDIMFEHFFLHKEGISKDPSRLVGQIHDGVSKANFSIGPMMLALAGTYRCYGSVTHTPYQLSAPSDPLDIVVTGPYEKPSLSAQPGPKVQAGESVTLSCSSRSSYDMYHLSRERGAHERRLPAVRKVNRTFQADFPLGPATHGGTYRCFGSFRHSPYEWSDPSDPLLVSVTGNPSSSWPSPTEPSSKSGNPRHLHILIGTSVVIILFILLLFFLLHLWCSNKKNAAVMDQEPAGNRTANSEDSDEQDPEEVTYAQLDHCVFTQRKITRPSQRPKTPPTDTILYTELPNAKPRSKVVSCP

SEQ ID NO: 2223 - DNA, 1014 bp, Homo sapien
ttcctcagaaacgagcaaacctgaaagctactctctcagcttcagagggaaaaaatggttgtagatttctggacttgggagcagacatttcaagaactaatccaagaggcaaaaccccgggccacatggacgctgaagttggatggcaaccttcagctagactgcctggctcaagggtggaagcaataccaacagagagcatttggctggttccggtgttcctcctgccagcgaagttgggcttccgccaagttgcagattctgtgccacacgtactgggagcactggacatcccagggtcaggtgcgtatgaggctctttggccaaaggtgccagaagtgctcctggtcccaatatgagatgcctgagttctcctcggatagcaccatgaggattctgagcaacctggtgcagcatatactgaagaaatactatggaaatggcatgaggaagtctccagaaatgccagtaatcctggaagtgtccctggaaggatcccatgacacagccaattgtgaggcatgcactttgggcatatgtggacagggcttaaaaagctacatgacaaagccgtccaaatccctactcccccacctaaagactgggaattcctcacctggaattggtgctgtgtacctcgcaaaccaagccaagaaccagtcagatgaggcaaaagaggctaaggggagtgggtatgagaaattagggcccagtcgagacccagatccactgaacatctgtgtctttattttgctgcttgtatttattgtagtcaaatgctttacatcagaatgatgaaaataggcttgccactttctcttattttaattccatggtagtcaatgaactggctgccactttaatataactgaaaattcattttgagaccaagcaggatcaagtttgtagaataaacactggtttcctagctatcctctgaaaacagtatgaaacatgaccaagtacataatggatttagtaataaatattgtcgaattgctaaaaaaaaaaaaa

SEQ ID NO: 2224 - protein, 246 aa, Homo sapien
MVVDFWTWEQTFQELIQEAKPRATWTLKLDGNLQLDCLAQGWKQYQQRAFGWFRCSSCQRSWASAKLQILCHTYWEHWTSQGQVRMRLFGQRCQKCSWSQYEMPEFSSDSTMRILSNLVQHILKKYYGNGMRKSPEMPVILEVSLEGSHDTANCEACTLGICGQGLKSYMTKPSKSLLPHLKTGNSSPGIGAVYLANQAKNQSDEAKEAKGSGYEKLGPSRDPDPLNICVFILLLVFIVVKCFTSE

SEQ ID NO: 2225 - DNA, 2115 bp, Homo sapien
taatagtcacatgacacgtttcccgtcaagatggcggatactctcccttcggagtttgatgtgatcgtaatagggacgggtttgcctgaatccatcattgcagctgcatgttcaagaagtggccggagagttctgcatgttgattcaagaagctactatggaggaaactgggccagttttagcttttcaggactattgtcctggctaaaggaataccaggaaaacagtgacattgtaagtgacagtccagtgtggcaagaccagatccttgaaaatgaagaagccattgctcttagcaggaaggacaaaactattcaacatgtggaagtattttgttatgccagtcaggatttgcatgaagatgtcgaagaagctggtgcactgcagaaaaatcatgctcttgtgacatctgcaaactccacagaagctgcagattctgccttcctgcctacggaggatgagtcattaagcactatgagctgtgaaatgctcacagaacaaactccaagcagcgatccagagaatgcgctagaagtaaatggtgctgaagtgacaggggaaaaagaaaaccattgtgatgataaaacttgtgtgccatcaacttcagcagaagacatgagtgaaaatgtgcctatagcagaagataccacagagcaaccaaagaaaaacagaattacttactcacaaattattaaagaaggcaggagatttaatattgatttagtatcaaagctgctgtattctcgaggattactaattgatcttctaatcaaatctaatgttagtcgatatgcagagtttaaaaatattaccaggattcttgcatttcgagaaggacgagtggaacaggttccgtgttccagagcagatgtctttaatagcaaacaacttactatggtagaaaagcgaatgctaatgaaatttcttacattttgtatggaatatgagaaatatcctgatgaatataaaggatatgaagagatcacattttatgaatatttaaagactcaaaaattaacccccaacctccaatatattgtcatgcattcaattgcaatgacatcagagacagccagcagcaccatagatggtctcaaagctaccaaaaactttcttcactgtcttgggcggtatggcaacactccatttttgtttcctttatatggccaaggagaactcccccagtgtttctgcaggatgtgtgctgtgtttggtggaatttattgtcttcgccattcagtacagtgccttgtagtggacaaagaatccagaaaatgtaaagcaattatagatcagtttggtcagagaataatctctgagcatttcctcgtggaggacagttactttcctgagaacatgtgctcacgtgtgcaatacaggcagatctccagggcagtgctgattacagatagatctgtcctaaaaacagattcagatcaacagatttccattttgacagtgccagcagaggaaccaggaacttttgctgttcgggtcattgagttatgttcttcaacgatgacatgcatgaaaggcacctatttggttcatttgacttgcacatcttctaaaacagcaagagaagatttagaatcagttgtgcagaaattgtttgttccatatactgaaatggagatagaaaatgaacaagtagaaaagccaagaattctgtgggctctttacttcaatatgagagattcgtcagacatcagcaggagctgttataatgatttaccatccaacgtttatgtctgctctggcccagattgtggtttaggaaatgataatgcagtcaaacaggctgaaacacttttccaggaaatctgccccaatgaagatttctgtccccctccaccaaatcctgaagacattatccttgatggagacagtttacagccagaggcttcagaatccagtgccataccagaggctaactcggagactttcaaggaaagcacaaaccttggaaacctagaggagtcctctgaataatggatatacaccaaactggatacccaactttggaaattctgactggtctcagagtctacttgatagaaggactgtttgagaaatgttagaaagcagcagcaattataaggcaaaataggtaat

SEQ ID NO: 2226 - protein, 653 aa, Homo sapien
MADTLPSEFDVIVIGTGLPESIIAAACSRSGRRVLHVDSRSYYGGNWASFSFSGLLSWLKEYQENSDIVSDSPVWQDQILENEEAIALSRKDKTIQHVEVFCYASQDLHEDVEEAGALQKNHALVTSANSTEAADSAFLPTEDESLSTMSCEMLTEQTPSSDPENALEVNGAEVTGEKENHCDDKTCVPSTSAEDMSENVPIAEDTTEQPKKNRITYSQIIKEGRRFNIDLVSKLLYSRGLLIDLLIKSNVSRYAEFKNITRILAFREGRVEQVPCSRADVFNSKQLTMVEKRMLMKFLTFCMEYEKYPDEYKGYEEITFYEYLKTQKLTPNLQYIVMHSIAMTSETASSTIDGLKATKNFLHCLGRYGNTPFLFPLYGQGELPQCFCRMCAVFGGIYCLRHSVQCLVVDKESRKCKAIIDQFGQRIISEHFLVEDSYFPENMCSRVQYRQISRAVLITDRSVLKTDSDQQISILTVPAEEPGTFAVRVIELCSSTMTCMKGTYLVHLTCTSSKTAREDLESVVQKLFVPYTEMEIENEQVEKPRILWALYFNMRDSSDISRSCYNDLPSNVYVCSGPDCGLGNDNAVKQAETLFQEICPNEDFCPPPPNPEDIILDGDSLQPEASESSAIPEANSETFKESTNLGNLEESSE

SEQ ID NO: 2227 - DNA, 2518 bp, Homo sapien
gggtgcgctcggccgtggcgcacctggtgagctccgggggcgctccgcctccgcgccccaaatccccggacctgcccaacgccgcctcggcgccgcccgccgccgctccagaagcgcccaggagccctcccgcgaaggctgggagcgggagcgcgacgcccgcgaaggctgttgaggctcgagcgagcttctccagaccgacctttctgcagctgagccccggggggctgcgacgcgccgatgaccacgcgggccgggctgtgcaaagccccccggacacgggccgccgcctgccctggagcacaggctacgccgagtgagcgccccctggggcacccaaaccaggatggggctcccacccctctccccagctccgcatccccggcgctaggacgcgttccccacgccgcgtccgggccaggagctcccttttccgtggacctttgctatcctctggtcttcgggccgcaccccctcccaacccattttccagtggggggcagcctgtgtcaccttcttcacgtccttcccgctcattgactgccctcgcccacgccgcctcaggaccctgttctgccccagagcccggagggcggagagcccggcgaaggatgagttggccagttccccgtcgcggcccggcagcttaaaggctaagggaaaaggggtttcacgaaggagcggggttctttttaataggggacatagcggttgggaagactcgctcacccgcttcccggctccagcgccccagttccctgtccctcttaccgtagttcccctccccctccacacccagaaatagcccgcgacaccaggaggccgccagcttccccaggagcggggagggggacgcccggggtagaggagggtcccatttagatgcccttcagcctgccaactcgtgctggcctggcaaagaagcggaccccctgcccggagcggccggctggcccccgggctgtgtgtattttaaatgcatctgccgggaacgcagagcaccgagggagatgggggcgctcagttcgctgaggaaggtggctggtggcccatggacccaccaccacctcccttagcctcctgtgtgggaggagtttatgggtatgtggctcctgcccagtccaggtgggctttcacttctactctatttcagttcctctttcccgatctgggctggagagcttcctcattgttaaggcagcagaaactttcgctggatggttttaggataaggggtcatcaatgctggcaagagtcggcacaatgaggaccaggcttgctgtgaagtggtgtatgtggaaggtcggaggagtgttacaggagtacctagggagcctagccgaggccagggactctgcttctactactggggcctatttgatgggcatgcagggggcggagctgctgaaatggcctcacggctcctgcatcgccatatccgagagcagctaaaggacctgaaggaagtgagccacgagagcctggtagtgggggccattgagaatgccttccagctcatggatgagcagatggcccgggagcggcgtggccaccaagtggaggggggctgctgtgcactggttgtgatctacctgctaggcaaggtgtacgtggccaatgcaggcgatagcagggccatcattgtccggaatggtgaaatcattccaatgtcccgggagtttaccccggagactgagcgccagcgtcttcagctgcttggcttcctgaaaccagagctgctaggcagtgaattcacccaccttgagttcccccgcagagttctgcccaaggagctggggcagaggatgttgtaccgggaccagaacatgaccggctgggcctacaaaaagatcgagctggaggatctcaggtttcctctggtctgtggggagggcaaaaaggctcgggtgatggccaccattggggtgacccgaggcttgggagaccacagccttaaggtctgcagttccaccctgcccatcaagccctttctctcctgcttccctgaggtacgagtgtatgacctgacacaatatgagcactgcccagatgatgtgctagtcctgggaacagatggcctgtgggatgtcactactgactgtgaggtagctgccactgtggacagggtgctgtcggcctatgagcctaatgaccacagcaggtatacagctctggcccaagctctggtcctgggggcccggggtaccccccgagaccgtggctggcgtctccccaacaacaagctgggttccggggatgacatctctgtcttcgtcatccccctgggagggccaggcagttactcctgaggggctgaacaccatccctcccactagcctctccatacttactcctctcacagcccaaattctgaagttgtctccctgacccttctttagtggcaacttaactgaagaagggatgtccgctatatccaaaattacagctattggcaaataaacgagatggataaaaaaaaaaaaaaaaaaaaaaaaaaaaaaaaaaaaaaaaaaaaaaa

SEQ ID NO: 2228 - protein, 299 aa, Homo sapien
MASRLLHRHIREQLKDLKEVSHESLVVGAIENAFQLMDEQMARERRGHQVEGGCCALVVIYLLGKVYVANAGDSRAIIVRNGEIIPMSREFTPETERQRLQLLGFLKPELLGSEFTHLEFPRRVLPKELGQRMLYRDQNMTGWAYKKIELEDLRFPLVCGEGKKARVMATIGVTRGLGDHSLKVCSSTLPIKPFLSCFPEVRVYDLTQYEHCPDDVLVLGTDGLWDVTTDCEVAATVDRVLSAYEPNDHSRYTALAQALVLGARGTPRDRGWRLPNNKLGSGDDISVFVIPLGGPGSYS

SEQ ID NO: 2229 - DNA, 1572 bp, Homo sapien
gcacagacagcaccatgtcgctcatggtcgtcagcatggcgtgtgttgggttcttcttgctgcagggggcctggccacatgagggagtccacagaaaaccttccctcctggcccacccaggtcgcctggtgaaatcagaagagacagtcatcctgcaatgttggtcagatgtcaggtttgagcacttccttctgcacagagaagggaagtttaaggacactttgcacctcattggagagcaccatgatggggtctccaaagccaacttctccatcggtcccatgatgcaagaccttgcagggacctacagatgctacggttctgttactcactccccctatcagttgtcagctcccagtgaccctctggacatcgtcatcacaggtctatatgagaaaccttctctctcagcccagccgggccccacggttctggcaggagagagcgtgaccttgtcctgcagctcccggagctcctatgacatgtaccatctatccagggagggggaggcccatgaatgtaggttctctgcagggcccaaggtcaacggaacattccaggccgactttcctctgggccctgccacccacggaggaacctacagatgcttcggctctttccgtgactctccatacgagtggtcaaactcgagtgacccactgcttgtttctgtcataggaaacccttcaaatagttggccttcacccactgaaccaagctctaaaaccggtaacccccgacacctgcacattctgattgggacctcagtggtcatcatcctcttcatcctcctcttctttctccttcatcgctggtgctccaacaaaaaaaatgctgcggtaatggaccaagagtctgcagggaacagaacagcgaatagcgaggactctgatgaacaagaccctcaggaggtgacatacacacagttgaatcactgcgttttcacacagagaaaaatcactcgcccttctcagaggcccaagacacccccaacagatatcatcgtgtacgcggaacttccaaatgctgagtccagatccaaagttgtctcctgcccatgagcaccacagtcaggccttgagggcgtcttctagggagacaacagccctgtctcaaaaccgggttgccagctcccatgtaccagcagctggaatctgaaggcatgagtctgcatcttagggcatcgctcttcctcacaccacaaatctgaatgtgcctctcacttgcttacaaatgtctaaggtccccactgcctgctggagaaaaaacacactcctttgcttagcccacagttctccatttcacttgacccctgcccacctctccaacctaactggcttacttcctagtctacttgaggctgcaatcacactgaggaactcacaattccaaacatacaagaggctccctcttaacgcagcacttagacacgtgttgttccaccttccctcatgctgttccacctcccctcagactagctttcagtcttctgtcagcagtaaaacttatatattttttaaaataacttcaatgtagttttccatccttcaaataaacatgtctgcccccatg

SEQ ID NO: 2230 - protein, 348 aa, Homo sapien
MSLMVVSMACVGFFLLQGAWPHEGVHRKPSLLAHPGRLVKSEETVILQCWSDVRFEHFLLHREGKFKDTLHLIGEHHDGVSKANFSIGPMMQDLAGTYRCYGSVTHSPYQLSAPSDPLDIVITGLYEKPSLSAQPGPTVLAGESVTLSCSSRSSYDMYHLSREGEAHECRFSAGPKVNGTFQADFPLGPATHGGTYRCFGSFRDSPYEWSNSSDPLLVSVIGNPSNSWPSPTEPSSKTGNPRHLHILIGTSVVIILFILLFFLLHRWCSNKKNAAVMDQESAGNRTANSEDSDEQDPQEVTYTQLNHCVFTQRKITRPSQRPKTPPTDIIVYAELPNAESRSKVVSCP

SEQ ID NO: 2231 - DNA, 971 bp, Homo sapien
taaaactttaggaaattagtaccagacttttatattggtcaacagcaaaatgaacattactactcagcctccaacacatgcagtttgcctataccagggatcctgtcaaaatatacaccacttatagcttcttaagtgcagttatcatagagcacagtccctgacatcacacagctgcagagatgaataaacaaagaggaacctactcagaagtgagtctggcccaggacccaaagaggcagcaaaggaaacttaagggcaataaaatctccatttcaggaaccaaacaggaaatattccaagtagaattaaaccttcaaaatgcttcttcggatcatcaagggaatgacaagacatatcactgcaaaggtttactgccacctccagagaagctcactgctgaggtcctaggaatcatttgcattgtcctgatggccactgtgttaaaaacaatagttcttattccttgtattggagtactggagcagaacaatttttccctgaatagaagaatgcagaaagcacgtcattgtggccattgtcctgaggagtggattacatattccaacagttgttattacattggtaaggaaagaagaacttgggaagaaagagtttgctggcctgtgcttcgaagaactctgatctgctttctatagataatgaggaagaaatggtaagacgtaaatgtttcaacactttactaaaagcttatttctgtcaatatcatatttgtagaaatcatccatatgtttatacatatatttacttcatatatttttaagtctgtgtagtattcaactgacttcataatatttttatattcatatactgttaatgcacatttggttatttccagttttgcttttcatggaaacccatgcttctataaatgtttttatcacaaaataaatataaagaaaactaaaaaaaaaccaaaaaaaaaaaaaaaaaaggcggccgcgatatag

SEQ ID NO: 2232 - protein, 158 aa, Homo sapien
MNKQRGTYSEVSLAQDPKRQQRKLKGNKISISGTKQEIFQVELNLQNASSDHQGNDKTYHCKGLLPPPEKLTAEVLGIICIVLMATVLKTIVLIPCIGVLEQNNFSLNRRMQKARHCGHCPEEWITYSNSCYYIGKERRTWEERVCWPVLRRTLICFL

SEQ ID NO: 2233 - DNA, 1700 bp, Homo sapien
ggcggcggcagcgggttcggttgcgcgtggcgcacggggtgggagcggagcccaggccgggagcaggcgccgccgccagcgaccatggggaacgtgttggctgccagctcgccgcccgcagggccgccaccgccgcctgcgccggccctcgtggggctgccgccacctccgccctcgccgccgggcttcacgctgccgccgctgggaggcagcctgggcgccggcaccagtacgagtcgaagttcggaacggacccccggggctgcaaccgccagcgcctcaggggccgccgaggatggggcctgcggctgcctgcccaacccgggcacattcgaggagtgccaccggaagtgcaaggagctgtttcccattcagatggagggtgtcaagctcacagtcaacaaagggttgagtaaccattttcaggtcaaccacacagtagccctcagcacaatcggggagtccaactaccacttcggggtcacatatgtggggacaaagcagctgagtcccacagaggcgttccctgtactggtgggtgacatggacaacagtggcagtctcaacgctcaggtcattcaccagctgggccccggtctcaggtccaagatggccatccagacccagcagtcgaagtttgtgaactggcaggtggacggggagtatcggggctctgacttcacagcagccgtcaccctggggaacccagacgtcctcgtgggttcaggaatcctcgtagcccactacctccagagcatcacgccttgcctggccctgggtggagagctggtctaccaccggcggcctggagaggagggcactgtcatgtctctagctgggaaatacacattgaacaactggttggcaacggtaacgttgggccaggcgggcatgcacgcaacatactaccacaaagccagtgaccagctgcaggtgggtgtggagtttgaggccagcacaaggatgcaggacaccagcgtctccttcgggtaccagctggacctgcccaaggccaacctcctcttcaaaggctctgtggatagcaactggatcgtgggtgccacgctggagaagaagctcccacccctgcccctgacactggcccttggggccttcctgaatcaccgcaagaacaagtttcagtgtggctttggcctcaccatcggctgagccctcctggcccccgccttccacgcccttccgattccacctccacctccacctccccctgccacagaggggagacctgagcccccctcccttccctccccccttgggggtcggggggggacattggaaaggagggaccccgccaccccagcagctgaggaggggattctggaactgaatggcgcttcgggattctgagtagcaggggcagcatgcccagtgggcctggggtcccgggagggattccggaattgaggggcacgcaggattctgagcaccaggggcagaggcggccagacaacctcagggaggagtgtcctggcgtccccatcctccaaagggcctgggcccgccccgagggggcagcgagaggagcttccccatccccggtcagtccaccctgccccgtccactttcccatctcctcggtataaatcatgtttataagttatggaagaaccgggacattttacagaaaaaaaacaaaaaacaacaaaaaatatacgtgggaaaaaaaaaaaaaaaaaaaa

SEQ ID NO: 2234 - protein, 361 aa, Homo sapien
MGNVLAASSPPAGPPPPPAPALVGLPPPPPSPPGFTLPPLGGSLGAGTSTSRSSERTPGAATASASGAAEDGACGCLPNPGTFEECHRKCKELFPIQMEGVKLTVNKGLSNHFQVNHTVALSTIGESNYHFGVTYVGTKQLSPTEAFPVLVGDMDNSGSLNAQVIHQLGPGLRSKMAIQTQQSKFVNWQVDGEYRGSDFTAAVTLGNPDVLVGSGILVAHYLQSITPCLALGGELVYHRRPGEEGTVMSLAGKYTLNNWLATVTLGQAGMHATYYHKASDQLQVGVEFEASTRMQDTSVSFGYQLDLPKANLLFKGSVDSNWIVGATLEKKLPPLPLTLALGAFLNHRKNKFQCGFGLTIG

SEQ ID NO: 2235 - DNA, 1806 bp, Homo sapien
acctcctgtacctcttagcttgtttaattttttttacagcatttatcagtttccagttgtacccctacaataatgtacgttccaagtgcctgaaatagtgcctagcacataatgtgtgaaacacacacacacacacacacatacccataacccactgaatgaatgaagagaaaccgaaaaaataaaagtataatatcccatccctgatcactctccagaaatgtatacttccaaggaacttgcatatttctataggtagaataattgatgatgataataacagtaatagctatatttgaatgtccattatttacactaatattcacagcaactctgcaaagtagttattatgaagagactgaggtgcagagaagaaagttcacataactgctaggtgctgaagctgagatttgtaactattggatatctgaatccaggggtcatgctcttcccattaactgcattgttatattatttcacaaatgtaacaaatatcaaaagaaaatcttggcattttcattttaagaggaattaggaaggaaaacaaataggtatataaaggtcagcctaagttgtcagcaattcttttccttaatctgtaagaatcttgctcatcgatcagggtgctgttaatcacactaggtcccaatctcttaataagggagttgggaggggtgtttcatcctaggacaggagtcatcagactcggttagagtaatgaaaaggattataatactaatttctgaagagaatgtgggactgaagctaaaaatactcactataaagtaactcttttggctatagtctattatatcacaaaaatattataaaaatcctcaggttcctttctatcttccacacctaattttcaaaaccgatcaatttttttaagccacttaacctgtgtgtaattactactgtggtctcctagcacagacaacagctgctgactgctgtggtattggcacggatcatgtagtctatagagaatttgataaaaagactccaaacaatttcatgccctgtgctgttacagaggagaacaaaatgctttcagcaaggatttgaaaactcttccgtccctgcaggaaaggattgatgctgatagaagagcctggacagatgtaatgagaactaaagaaaacagatggctggagatgacatttatccagggtcactttgtcaggccctaggacttaaatcgaagttgaactttttttttttaaccaaatagataggggaagggaggagggagagggaggacagggagagaaaataccatgcataaattgtttactgaatttttatatctgagtgttcaaaatatttccaagcctgagtattgtctattggtatagatttttagaaatcaataattgattatttatttgcacttattacaatgcctgaaaaagtgcaccacatggatgttaagtagaaattcaagaaagtaagatgtcttcagcaactcagtaaaaccttacgccaccttttggtttgtaaaaggttttttatacatttcaaacaggttgcacaaaagttaaaataatggggtcttttataaatccaaagtactgtgaaaacattttacatattttttaaatcttctgactaatgctaaaacgtaatctaattaaatttcatacagttactgcagtaagcattaggaagtgaatatgatatacaaaatagtttataaagactctatagttcctataatttattttactggcaaatgtcatgcaacaataataaattattgtaaactttgaaaaaaaaaaaaaaaaaaaaaaaaaaaaaaaaaaa

SEQ ID NO: 2236 - protein, 51 aa, Homo sapien [sequence omitted]

SEQ ID NO: 2237 - DNA, 2641 bp, Homo sapien
ggggagagcgggtgtttgaaggctccgcggaccggcactaggagccgggggcgggtccgtgaccctccggctgctcggagtgaacaggcggccaggaaagaagcgggcctgaacaccatgatccctttggagaagccaggcagcggcggctcctccccaggcgccacctcaggctcgggccgggcaggccggggtctgagcgggccgtgccggccgccgccgccgccccaggcccgcgggctgctgacagagatacgcgccgtggtgcgcaccgagcccttccaggacggctacagcctgtgcccgggccgggagctgggcagggggaaatttgcagtggtgagaaaatgtataaagaaagattctgggaaagaatttgctgcaaagttcatgagaaaaagaagaaaaggccaagattgtcggatggaaataattcatgagattgctgtacttgaactagcacaagacaatccttgggtcattaatttacatgaagtttatgagactgcatcagaaatgatcttagttctggaatatgctgctgggggtgaaatctttgaccagtgtgttgcagacagagaagaagcctttaaagaaaaagatgttcaaagacttatgcgacagattttagaaggtgttcactttttacacactcgtgatgtagttcatcttgatttgaagcctcagaatattctgttgacaagtgaatctccattgggtgacattaagattgttgattttggcctttcaagaatattgaagaacagtgaagagctccgagaaattatgggtacccctgaatatgtggctcctgaaattcttagttatgatcctataagcatggcaacagatatgtggagcattggagtgttaacatatgtcatgcttacaggaatatcacctttcttaggcaatgataaacaagaaacattcttaaacatctcacagatgaatttaagttattctgaggaagaatttgatgttttgtctgagtcggctgttgatttcatcaggacacttttagttaagaaacctgaagatcgagccactgctgaagaatgtctaaagcacccctggttgacacagagcagtattcaagagccttctttcaggatggaaaaggcactagaagaagcaaatgccctccaagaaggtcattctgtgcctgaaattaattcggataccgacaaatcagaaaccgaggaatccattgtaaccgaagagttaattgtagttacttcatatactctaggacaatgcagacagtctgaaaaagagaaaatggagcaaaaggccatttccaaacgatttaaatttgaggaacctttgctacaagaaattccaggagaatttatctactgagcaatatttccctttagaacttcaagatttctacactgaaaatgttaatattatttatggacctctggccaaatggtacatgtactggaagtggataaccagtatcacttacacaaacaaaaataactttgtcaaatttgtggagttaggtggaagccagattttaaaagttgccaaccaggatatttaacaggtacagttacccgtttcaatgttatttttaagaagggagatgttggcacctttgaattctacatcctgtttctccagaatgagaatttgtgtacaaagatatttgtattcactttctttaaaaaatccaagtaaaagtgccaaaactacatttctgtaaatctcttgcattattcatatgtgtatctatatctgcataatgtttgttaatgtctactaaaattgctactttttcactttggatttgtttttggcaaaattttagtctaaacagacatctaaattttcgagacttagaataacattcactaaagtttgataatgtcttttttaaatattttcttactgctttatagtgacttgatttggtttctgttgtgtttttgcctaaatactagtaacatatcagtgaaaaaccctaattttttttctcttcaatgtcactagtaagagaggtggtaatttttcacctctgaaattattctgggtttaggtgtcagcttttgagctgcttccctcatcacaccacactcacatgcatctgttctctctcacactctatacccctgccacttcctggcacctccccccatgcttgtcatttaattttggccacttgtaggtatcagtgtgatctgatcaacactctggttaccttggtcagtgaaaagatgctactatattgcttttgtcccaaagtgagtaaaatcccctagagcagagagagagagagagagagagtgtcttcatgccaaccacagcctgtttctgctgagtttcttatcagccctcaagctatgctaggaaaagttataaaatgccaaaatatttataaacatttactttgtccataaaaaatttacattggatactctgtaagtaggaggtactttgtcccaaaaagatgtataagaatgtactaatagttttatttgattaggattgaacagttcagttgtatctatgccccacagtgaccagtaaagtccaattaaaatatggaaatgtaaaagtgtatgccgaataccttaaagtaactaattatccttacacacaaaaggctcagtgcattaaatatttgcctatc

SEQ ID NO: 2238 - protein, 414 aa, Homo sapien
MIPLEKPGSGGSSPGATSGSGRAGRGLSGPCRPPPPPQARGLLTEIRAVVRTEPFQDGYSLCPGRELGRGKFAVVRKCIKKDSGKEFAAKFMRKRRKGQDCRMEIIHEIAVLELAQDNPWVINLHEVYETASEMILVLEYAAGGEIFDQCVADREEAFKEKDVQRLMRQILEGVHFLHTRDVVHLDLKPQNILLTSESPLGDIKIVDFGLSRILKNSEELREIMGTPEYVAPEILSYDPISMATDMWSIGVLTYVMLTGISPFLGNDKQETFLNISQMNLSYSEEEFDVLSESAVDFIRTLLVKKPEDRATAEECLKHPWLTQSSIQEPSFRMEKALEEANALQEGHSVPEINSDTDKSETEESIVTEELIVVTSYTLGQCRQSEKEKMEQKAISKRFKFEEPLLQEIPGEFIY

SEQ ID NO: 2239 - DNA, 1719 bp, Homo sapien
ctttccgcgcggcggaagagcgcgcgccagcttcggcacacttgggagccggatcccagccctacgcctcgtcccctacaagctcctccaagccccgccggctgctgtgggagcggcggccgtcctctcctggaggtcgtctcctggcatcctcggggccgcaggaaggaagaggaggcagcggccggagccctggtgggcggcctgaggtgagagcccgaccggcccctttgggaatatggcgaccggtggctaccggaccagcagcggcctcggcggcagcaccacagacttcctggaggagtggaaggcgaaacgcgagaagatgcgcgccaagcagaaccccccgggcccggcccccccgggagggggcagcagcgacgccgctgggaagccccccgcgggggctctgggcaccccggcggccgccgctgccaacgagctcaacaacaacctcccgggcggcgcgccggccgcacctgccgtccccggtcccgggggcgtgaactgcgcggtcggctccgccatgctgacgcgggcgcccccggcccgcggcccgcggcggtcggaggacgagcccccagccgcctctgcctcggctgcaccgccgccccagcgtgacgaggaggagccggacggcgtcccagagaagggcaagagctcgggccccagtgccaggaaaggcaaggggcagatcgagaagaggaagctgcgggagaagcggcgctccaccggcgtggtcaacatccctgccgcagagtgcttagatgagtacgaagatgatgaagcagggcagaaagagcggaaacgagaagatgcaattacacaacagaacactattcagaatgaagctgtaaacttactagatccaggcagttcctatctgctacaggagccacctagaacagtttcaggcagatataaaagcacaaccagtgtctctgaagaagatgtctcaagtagatattctcgaacagatagaagtgggttccctagatataacagggatgcaaatgtttcaggtactctggtttcaagtagcacactggaaaagaaaattgaagatcttgaaaaggaagtagtaacagaaagacaagaaaacctaagacttgtgagactgatgcaagataaagaggaaatgattggaaaactcaaagaagaaattgatttattaaatagagacctagatgacatagaagatgaaaatgaacagctaaagcaggaaaataaaactcttttgaaagttgtgggtcagctgaccaggtagaggattcaagactcaatgtggaaaaaatattttaaactactgattgaatgttaatggtcaatgctagcacaatattcctatgctgcaatacattaaaataactaagcaagtatatttatttctagcaaacagatgtttgttttcaaaatacttctttttcattattggttttaaaaaagcattatccttttatctcacaaataagtaatatctttcagttattaaatgatagataatgcctttttggttttgtgtggtattcaactaatacatggtttaaagtcacagccgtttgaatatattttatcttggtagtacattttctcccttaggaatatacatagtctttgtttacatgagttccaatacttttgggatgttaccctcacatgtccctatactgatgtgtgccaccttttatgtgttgatgactcactcataaggttttggtc

SEQ ID NO: 2240 - protein, 342 aa, Homo sapien
MATGGYRTSSGLGGSTTDFLEEWKAKREKMRAKQNPPGPAPPGGGSSDAAGKPPAGALGTPAAAAANELNNNLPGGAPAAPAVPGPGGVNCAVGSAMLTRAPPARGPRRSEDEPPAASASAAPPPQRDEEEPDGVPEKGKSSGPSARKGKGQIEKRKLREKRRSTGVVNIPAAECLDEYEDDEAGQKERKREDAITQQNTIQNEAVNLLDPGSSYLLQEPPRTVSGRYKSTTSVSEEDVSSRYSRTDRSGFPRYNRDANVSGTLVSSSTLEKKIEDLEKEVVTERQENLRLVRLMQDKEEMIGKLKEEIDLLNRDLDDIEDENEQLKQENKTLLKVVGQLTR

SEQ ID NO: 2241 - DNA, 599 bp, Homo sapien
aggccgcgctcgcgccgaggggctgcgagagtgaccgcggctgctccagcgctgacgccgagccatggcggacgaggagcttgaggcgctgaggagacagaggctggccgagctgcaggccaaacacggggatcctggtgatgcggcccaacaggaagcaaagcacagggaagcagaaatgagaaacagtatcttagcccaagttctggatcagtcggcccgggccaggttaagtaacttagcacttgtaaagcctgaaaaaactaaagcagtagagaattaccttatacagatggcaagatatggacaactaagtgagaaggtatcagaacaaggtttaatagaaatccttaaaaaagtaagccaacaaacagaaaagacaacaacagtgaaattcaacagaagaaaagtaatggactctgatgaagatgacgattattgaactacaagtgctcacagactagaacttaacggaacaagtctaggacagaagttaagatctgattatttactttgtttattgtctatatgccttttaaaaaaataaacttgttatgcaaaataaaaaaaaaaaaaaaaaaaaaaaaaaaaaaaaaaaa

SEQ ID NO: 2242 - protein, 125 aa, Homo sapien
MADEELEALRRQRLAELQAKHGDPGDAAQQEAKHREAEMRNSILAQVLDQSARARLSNLALVKPEKTKAVENYLIQMARYGQLSEKVSEQGLIEILKKVSQQTEKTTTVKFNRRKVMDSDEDDDY

SEQ ID NO: 2243 - DNA, 2934 bp, Homo sapien
gcccctccctccgcccgcccgccggcccgcccgtcagtctggcaggcaggcaggcaatcggtccgagtggctgtcggctcttcagctctcccgctcggcgtcttccttcctcctcccggtcagcgtcggcggctgcaccggcggcggcgcagtccctgcgggaggggcgacaagagctgagcggcggccgccgagcgtcgagctcagcgcggcggaggcggcggcggcccggcagccaacatggcggcggcggcggcggcgggcgcgggcccggagatggtccgcgggcaggtgttcgacgtggggccgcgctacaccaacctctcgtacatcggcgagggcgcctacggcatggtgtgctctgcttatgataatgtcaacaaagttcgagtagctatcaagaaaatcagcccctttgagcaccagacctactgccagagaaccctgagggagataaaaatcttactgcgcttcagacatgagaacatcattggaatcaatgacattattcgagcaccaaccatcgagcaaatgaaagatgtatatatagtacaggacctcatggaaacagatctttacaagctcttgaagacacaacacctcagcaatgaccatatctgctattttctctaccagatcctcagagggttaaaatatatccattcagctaacgttctgcaccgtgacctcaagccttccaacctgctgctcaacaccacctgtgatctcaagatctgtgactttggcctggcccgtgttgcagatccagaccatgatcacacagggttcctgacagaatatgtggccacacgttggtacagggctccagaaattatgttgaattccaagggctacaccaagtccattgatatttggtctgtaggctgcattctggcagaaatgctttctaacaggcccatctttccagggaagcattatcttgaccagctgaaacacattttgggtattcttggatccccatcacaagaagacctgaattgtataataaatttaaaagctaggaactatttgctttctcttccacacaaaaataaggtgccatggaacaggctgttcccaaatgctgactccaaagctctggacttattggacaaaatgttgacattcaacccacacaagaggattgaagtagaacaggctctggcccacccatatctggagcagtattacgacccgagtgacgagcccatcgccgaagcaccattcaagttcgacatggaattggatgacttgcctaaggaaaagctcaaagaactaatttttgaagagactgctagattccagccaggatacagatcttaaatttgtcaggacaagggctcagaggactggacgtgctcagacatcggtgttcttcttcccagttcttgacccctggtcctgtctccagcccgtcttggcttatccactttgactcctttgagccgtttggaggggcggtttctggtagttgtggcttttatgctttcaaagaatttcttcagtccagagaattcctcctggcagccctgtgtgtgtcacccattggtgacctgcggcagtatgtacttcagtgcaccttactgcttactgttgctttagtcactaattgctttctggtttgaaagatgcagtggttcctccctctcctgaatccttttctacatgatgccctgctgaccatgcagccgcaccagagagagattcttccccaattggctctagtcactggcatctcactttatgatagggaaggctactacctagggcactttaagtcagtgacagccccttatttgcacttcaccttttgaccataactgtttccccagagcaggagcttgtggaaataccttggctgatgttgcagcctgcagcaagtgcttccgtctccggaatccttggggagcacttgtccacgtcttttctcatatcatggtagtcactaacatatataaggtatgtgctattggcccagcttttagaaaatgcagtcatttttctaaataaaaaggaagtactgcacccagcagtgtcactctgtagttactgtggtcacttgtaccatatagaggtgtaacacttgtcaagaagcgttatgtgcagtacttaatgtttgtaagacttacaaaaaaagatttaaagtggcagcttcactcgacatttggtgagagaagtacaaaggttgcagtgctgagctgtgggcggtttctggggatgtcccagggtggaactccacatgctggtgcatatacgcccttgagctacttcaaatgtggtttatacctcgcagatacaagaatctttatgaatatacaattctttttccttctacagcttagctccgtcttttcaaccacgaacatttaaaacccgacctactagcactgttctgtcctcaagtactcaaatatttctgatactgctgagtcagactgtcagaaaaagctagcactaactcgtgtttggagctctatccatattttactgatctctttaagtatttgttcctgccactgtgtactgtggagttgactcggtgttctgtcccagtgcggtgcctcctcttgacttccccactgctctctgtggtgagaaatttgccttgttcaataattactgtaccctcgcatgactgttacagctttctgtgcagagatgactgtccaagtgccacatgcctacgattgaaatgaaaactctattgttacctctgagttgtgttccacggaaaatgctatccagcagatcatttaggaaaaataattctatttttagcttttcatttctcagctgtccttttttcttgtttgatttttgacagcaatggagaatgggttatataaagactgcctgctaatatgaacagaaatgcatttgtaattcatgaaaataaatgtacatcttctatcttcaaaaaaaaaaaaaaaaaaa

SEQ ID NO: 2244 - protein, 360 aa, Homo sapien [sequence omitted]

SEQ ID NO: 2245 - DNA, 5397 bp, Homo sapien
gcgcactggagccctggccagcgcgcagccttcccggcgccggcgggctgggtcttgggaattctggtttgctttggctcactcgctttttacaaaccactggatcttacatgcctctgtaccccccacttccactccatgtccccatgctcctgcgccagcaacaggacatgttctctggatgtcagctgagtcattaaagtaactctgcatgtcagtagacagaccttggtagaaccacaaggctcccagagacacccatctctcctcatttttttggtgtgtgtgtcttcaccgaacattcaaaactgtttctccaaagcgttttgcaaaaactcagactgttttccaaagcagaagcactggagtccccagcagaagcgatgggcagtgtgcgaaccaaccgctacagcatcgtctcttcagaagaagacggtatgaagttggccaccatggcagttgcaaatggctttgggaacgggaagagtaaagtccacacccgacaacagtgcaggagccgctttgtgaagaaagatggccactgtaatgttcagttcatcaatgtgggtgagaaggggcaacggtacctcgcagacatcttcaccacgtgtgtggacattcgctggcggtggatgctggttatcttctgcctggctttcgtcctgtcatggctgttttttggctgtgtgttttggttgatagctctgctccatggggacctggatgcatccaaagagggcaaagcttgtgtgtccgaggtcaacagcttcacggctgccttcctcttctccattgagacccagacaaccataggctatggtttcagatgtgtcacggatgaatgcccaattgctgttttcatggtggtgttccagtcaatcgtgggctgcatcatcgatgctttcatcattggcgcagtcatggccaagatggcaaagccaaagaagagaaacgagactcttgtcttcagtcacaatgccgtgattgccatgagagacggcaagctgtgtttgatgtggcgagtgggcaatcttcggaaaagccacttggtggaagctcatgttcgagcacagctcctcaaatccagaattacttctgaaggggagtatatccctctggatcaaatagacatcaatgttgggtttgacagtggaatcgatcgtatatttctggtgtccccaatcactatagtccatgaaatagatgaagacagtcctttatatgatttgagtaaacaggacattgacaacgcagactttgaaatcgtggtcatactggaaggcatggtggaagccactgccatgacgacacagtgccgtagctcttatctagcaaatgaaatcctgtggggccaccgctatgagcctgtgctctttgaagagaagcactactacaaagtggactattccaggttccacaaaacttacgaagtccccaacactcccctttgtagtgccagagacttagcagaaaagaaatatatcctctcaaatgcaaattcattttgctatgaaaatgaagttgccctcacaagcaaagaggaagacgacagtgaaaatggagttccagaaagcactagtacggacacgccccctgacatagaccttcacaaccaggcaagtgtacctctagagcccaggcccttacggcgagagtcggagatatgactgactgattccttctctggaatagttactttacaacacggtctgttggtcagaggcccaaaacagttatacagatgacggtactggtcaagatgggtcaagcaagcggccacaagggactgaggcaagcacaatggtttcaaagaaagactgtaagctccatgattagcataaagcactaaccatgtctccatgtgacccgatggcacatagatgttgtagaataagttatgggtttttatgttttgttttgtgtttttccaaaacttgaacttgcaggcaagccttggttgggtatttgatttatccagaatgcttctctttagggaacaaggatgtttttaatggcataacaaaggcaagactctgccttaatttttgaaaagctgctaactacatgaacacaaatgtgtatttttgttgcagtgtagttttccttttgtgtaattttaaagtcagtgttgaattttattgaaagctcatgatgcgcttcaaagtggcaagtatttggctattaactgccaaaacaagagcctgattttttgaggccagtaattcgtttgctagaattgattttttttctctctctctttgttacataagggcattatgtaacactagccgaatggtagcctctgggttgttgtttttttcttttcctccatgatgttaatgggttatctcaaattttaagttaaactacctaaaataaataccaaagataatgcatatttttgcacagtggagcttacacttaaaagaaaacaaagccccatgggctgccttgaaatcaagagacaataactttgaacctcagcaagaccttgaaccgccggttcattttgcaccttattcagaaaatagagcatcatactcaccgagtctagtcagtgtagtgcttttaaaaattttgtcctttcatgtaacttttttattttaagaggaagaagaagaaaggggcacacacacacaataccgacgtctatcctttcctgctaggcagtgctggccaggctcatgtgtagtgtgcgagatggtgatgtactcttatatttttctgggcttttccttttgcacattccaaaattcatttcataagacaagatcttcataggacctccttggcatcctggcattctcaaaactgagccatccagcatgaaagataaatgggtttaaacccttgctgctgaatttattgcctggactgtcaggacatcaccagcccaccttcaccttagggaagatgccacacctggcctccacacttgctcttctgatcagtctgtctggattgagtcctacagtgtcagatagggcggcaaatgccaaagcagggaaacagggaggtgtggacaagccagtttgatgcagcacttcagatcaagtgcttaggaaggagaggaaacttgccttttttatggcagaggatagtaatgaaaatgtctcagtattttagggtcaatgagagccataaaaatataacataatcacaagtaaaggagataatggtctaaaacagctatttcccttttctgtgtgcatacttatgactgaatgtgagctaagcattttctcctgtggagccctagagcaggttactaaggaaggacacattgttttccagaagcctcccctgcctggctgactgccttgctagaaacataattttttttttctcactgaagctcaataatggaactctttttttttttttttttaatttaaagttccctatttgtgaattctgggattactgacttttctttttaattggagtctcaaaatcaactctcttatggtattatatctctgtatgccattaaaaaacagcttgttctagaatcatgtattttgtaaactgatgtttgtgatggtctctggttcttgaacagccatatctgaatgccgtgcctgcaaaactatgacaatttttgctgttttcagccttcagatttgatggcttgggaaactgaggtgttattttcaatgaaacaaagaaagagatgttaagcaagtggttgttttagatccaaatgtaaaggcaggtttgggaaggtgtttaaagagttggaggaattggggattgagttgtaaagaaaacttacagaagaggcaacaatttggttcttgacagtgagaggatattgagggcttcagctgctgctattatgatgttttgcaaaggaaaataatcaaaccaaagagtattcagtgatatgtaaattaaatgaagatacagtggagaatgggggtgaccacaaaagaggctccccctaaacacacagtgctgccacttaaaaagacttgagaaatttgaaagggggtgggtatggggggggcaagaaagagggagggaaatctttcaacttatttctgaaaaagagaaaaaaatataaaatttctggtgcacaggtttgttttttcaagaaaattttgcagaagctatgtttttaaagtgtacattttataaagtttatcagatattttcatatttaaagccaaatgtaaatagaggtctgtaaagaaaaataattgccatagaaagtataatttcagtgcagtaatttctgagagctagtacctatatgctaccggttagcatggttttagcaaatatataccagccttataaggttcgtattgctatgttcttctgttatttatttcagcatggactgttcatttgaaacctttttctagttattagcgttttaacagttacaagctttaaatggcaattttttttttttttttttttttttttttttttttgtcaagagccaagacacaggtaatgcacgacattgattgctgcattttaccttcaaaatatttgtccttattgactgggtctccttaattaatgtacacatgtcattagaatgcagacggaggggactcaccatgaatatctggggttgattcccagatgtgtgttgcttctctattgcaagcagattccctgttggatttacttcggatttattcccttttaaagaatttttgcccatatctggaagggcactatatttttgggaggagccatagattcctggttatcctatttttaaacaaaatgtagacaaagtgaactctattttgattattgagaaaggagtagttttctatccctctaagagtatacttgaatcagacattttaaggatgtcactatggcactgttgtcatttccaaattcctagaaaagtttgttttactttgtttttattctgttaatgcattctttcttctctttacttcctttcttaccagtacactcctatctcaactctgtttatttgatgagttctgtcccgtaaatcatatttcccttacaattaataaatgtcacttcatattttataataaaccactcagtaaaagcaaaagcttgtcctgagaagtagagtgagttctttttcactctgtgtctaataatgttaaggtgggaaaaaaaaaagtgtggcatagctacctgcccatccccaaccctcagcaaagtagaatctcttttctggtaattttgggtttccgctctgggctctggcaagttgaacaatcctagccattgacaatcgtgatagttattattttcccatttgctgtctttttgtatctaaagtcttcctattgtactgcacaaaccatggattgtacatatttttatatattatgtcttattttattatttctaaataaaaaaattaaaaattgaaaaaaaaaaaaa

SEQ ID NO: 2246 - protein, 427 aa, Homo sapien
MGSVRTNRYSIVSSEEDGMKLATMAVANGFGNGKSKVHTRQQCRSRFVKKDGHCNVQFINVGEKGQRYLADIFTTCVDIRWRWMLVIFCLAFVLSWLFFGCVFWLIALLHGDLDASKEGKACVSEVNSFTAAFLFSIETQTTIGYGFRCVTDECPIAVFMVVFQSIVGCIIDAFIIGAVMAKMAKPKKRNETLVFSHNAVIAMRDGKLCLMWRVGNLRKSHLVEAHVRAQLLKSRITSEGEYIPLDQIDINVGFDSGIDRIFLVSPITIVHEIDEDSPLYDLSKQDIDNADFEIVVILEGMVEATAMTTQCRSSYLANEILWGHRYEPVLFEEKHYYKVDYSRFHKTYEVPNTPLCSARDLAEKKYILSNANSFCYENEVALTSKEEDDSENGVPESTSTDTPPDIDLHNQASVPLEPRPLRRESEI

SEQ ID NO: 2247 - DNA, 1228 bp, Homo sapien
agattgttctggcaaggaacagccagtgggaggttccagctgagcgctccccagaggtgagctgatccccagccacagcacacaggaccaggctgcgagaacagcatcatcagcatcatgctattacaatcccaaaccatgggggtttctcacagctttacaccaaagggcatcactatccctcaaagagagaaacctggacacatgtaccaaaacgaagattacctgcagaacgggctgccaacagaaaccaccgttcttgggactgtccagatcctgtgttgcctgttgatttcaagtctgggggccatcttggtttttgctccctacccctcccacttcaatccagcaatttccaccactttgatgtctgggtacccatttttaggagctctgtgttttggcattactggatccctctcaattatctctggaaaacaatcaactaagccctttgacctgagcagcttgacctcaaatgcagtgagttctgttactgcaggagcaggcctcttcctccttgctgacagcatggtagccctgaggactgcctctcaacattgtggctcagaaatggattatctatcctcattgccttattcggagtactattatccaatatatgaaatcaaagattgtctcctgaccagtgtcagtttaacaggtgtcctagtggtgatgctcatcttcactgtgctggagctcttattagctgcatacagttctgtcttttggtggaaacagctctactccaacaaccctgggagttcattttcctcgacccagtcacaagatcatatccaacaggtcaaaaagagttcttcacggtcttggatataagtaactcttggcctcagaggaaggaaaagcaactcaacactcatggtcaagtgtgattagactttcctgaaatctctgccattttagatactgtgaaacaaactaaaaaaaaaaaagcttttgttttgtatttgtttactatgagtcgttatttaatttctcttgaaaataatttcctcaaagcccaagtcaataaatgttatcagccagtcttccaaaatggtcataaactttataaactgctttgggtaaactgagcagaaggtgatacacagaagggaaaatgtgcactcatgctagtgtgaatttggtaagtcgcgtgactctgcaggctgtttctgtattattttcacactcatattgcttaaatattacatattagggattg

SEQ ID NO: 2248 - protein, 240 aa, Homo sapien
MLLQSQTMGVSHSFTPKGITIPQREKPGHMYQNEDYLQNGLPTETTVLGTVQILCCLLISSLGAILVFAPYPSHFNPAISTTLMSGYPFLGALCFGITGSLSIISGKQSTKPFDLSSLTSNAVSSVTAGAGLFLLADSMVALRTASQHCGSEMDYLSSLPYSEYYYPIYEIKDCLLTSVSLTGVLVVMLIFTVLELLLAAYSSVFWWKQLYSNNPGSSFSSTQSQDHIQQVKKSSSRSWI

SEQ ID NO: 2249 - DNA, 7909 bp, Homo sapien
ttcaagtatggcagacaaaggatgttctgcgtggggaaatgtggtgacacccatttcacaaggacagctcacatagattgagtgctcaggaaggaccagcaccatacccagtgcctgatgtgtatcatctcaattagtccttgcctcagatgcaaaaggaaaccatcgccatcatcatcaccaccatcatcatcttcctcctgtgcagatggaaaggctgaggcatagagaggtgacggagtctgcccaggactgcaagcctgctggtggcagagccaggttccaatggaatgaaggctgtcatcctcagatggcagggtaggcaggtggctagagctcacttgggagaaggggaaaggacactgactttggctagggatggagcagagcttgggctggctttccatgcacgggcagggggcgtggctcatggctacgctccagccccgggtgtggacattgaatcttccaggtctaccctaggctatgggtctggacagcactgtgatggaaagaagacactctatgtcctgcattctgtgaccaatgatgtgactgtgggaatggcgctggcatctggctgccactctgggacgggtggccagctgccatcaggccccacccaggatgggaccaccatgcgacttcttccctcgctcctcctggtcatgtccagagccccaggaggaccagcaaagcctctcgagccgatggcagctcacgttctgccttgtcagctactcctctcctgggcaatattggctgcttgctgtggctctccccggggtatgtgactgcctctgtgctgggcacctggcctgggctttccttctgggcctgggcagctgggctcagcttggacccaggcagcagccacagaggggcccatggaggtgacagagttgcttctatgatggtgaacgggcagctgtgacacggaggaggcgaccactcctcagtttccaagtgctgcggtcagggccggggccagcaaagtccctcccatattcaaagagcgggtttgggtttgtcccaggaggacatagtcaggagcccatgctgggacatgcctcctccaaagttcagcctggatccccagcctctgccaacggccccgctccttagctaacccagcttgctcctgggttccacggcggagtcagatgtttctgggcagtttcacctttgtgccttaaatgcatgttgaggactttaaggaattgtggagaaatagggctgtggcaaaggcaagtgacaactgggaacaatgatcccgcagaggctgctgaggcctgggccccaggggcgtgggttcatccttctgcctgggctttggtgggaggggcagactctgtggtctgagacacaaaaaaacccaaaacatatgtgtgtacagacacacagcagagccacacacacacttgtgcccatgcacacactcacaggaggcccgtggactccgcacagggaagaaactcctccggtcgacagtggacggcgctgcagcagggactcacccccaagccctgcctgcctcccattgcccacctggccctggcttgatgggcttatctcatgctgtggccggggacctcttgcttcctgcaaccccttgctggactggggcctgggcctctcctgggctgtgcctagggtttgtaacccagggcctgtgccggcgtgcacagagcatctctccctgggaggctcagggctgcctcctcgagctctgtgggcctgcactggccggtgagcttgtggtgtgggttttcaggctgtatccttctacctcctgagcccaggggtcccaggcgccctgcagctgtctcctcggccatcctgtggggccccgaggccttgccctcacttcagtgcctgggtgctcaggctttgcccaggtgccaggagaaggtgtgagcatgagcctattggacacacctggcgacgtataccaggtgtcccacccctgccaccatggggcctcccgatacggcaaccaccacggacctgtggggaccaatgaggaaagagagaggcaggtctgggccaggctcacagggactccggcatagcagaccctgccccagcaggcccccttgtccttcctgggtcctggtccttcatgaggaactagcccatccctggtggggctcccaccccgcttctcagtgggctctatgcttgcctcgtcggagtcacccctcaggcagtcctgggatcctctcctttagacccactgtgccttcccggcctcccgggcttctgctgggggcagaagaaatgcctccccaggtctgtctctggaggctctgagggagatgggcttgggggctgtaggaggaggcagggattccagggtgtcaggaaggcaggggtgccaggtcccacctagtgaagtaataaaccgtgggtggtgatagtgacccagtgccctcactgcccagccccgcctgtcctcagccagcactgcagggatcccaggcccagactctggaggccttcactgatcccagccaccccagaaaagctgcagcctgcaggcaccagccgggccatatgcccagtgccagctagggcccaccgcccatcctgcacacggggccgctgggcaggtgcccctcacacccccaggatgtcagtgctcacctcgagcaaagcgccccagctcggccttgggaggtggtcatgtccagggggatgatggagagctgtccaaccaagagagcgggagggagggaaggagggagggagagagatagagagagagagagagagagaggaagtgtgggccctaaggctgccttagtggaggtgcgcgtggcctgcacctcaccaagcctagccactctcgcggctctgagtggctcacaggcttgtgagggccccgtcgctgcctgctgggtccccaccagggctccctctaggaatgcgccatggctgctatgacaatttgcacagcccagtggcttaaacaccatttataccacaggtccagatgaatcctgcagggccaaggtctgggggtgctggaggccatgctccctccaggcttgcggggagaacttccctgcctcctccagtctctccatccctgagctctcggctcctcctccgtcttcagggccagggcgtagcgtctgctctctcggcctctgcctccgcttcccacctcacctggcttctgtctatgtcagtctccctctgccaacctcctagaaggacacttgtgattacattagggctcacccctttaatccaggggagcctctccacttcatgattttcagctaacttgcttctgcacagaccccctttccctataagggcacacattcactggtcccggggctaaggaccttgctccaagtccctccacccatgatgctgtgccttccagaaacctgtcctctgcagctcggtcttgaccccaagcctgctggtgacctgaacttcacagggttatccccttggactgtgtgcagcacgatgcaatttctgggcctgaatgtcatgctccctggggcaggaccttgagcctgcagcacacactaggccacctgcagtctcacaggccatgccctgggtagacagggaggtgctcaaccccagctcgggtcctctagtctgcctggctaccatgcttctcactctcctgcatctgcagaccctgcgttgccatgtgaggcaggggtggggtggggctgagggcgtggctttggtccctggctgtccggatgaagtaccagagtgacgccacagcccatcccggtgacatgctcacccccaacccccgtgtccgggaccccggtcttgtgtggtccctgatgtggagtcctcagtccttaagatacatccagaaagtcctggccatgaattggaggtgcagagtcctgcagagcctctgggctgggctggtgcccccaggagatggagggcctggtggatgccctcctccctcagagctggggcagctgcctcccaggggtgggactctgggctcagagagaggcccttgagctgcagctcagggggatgcgaggcttcgtggactgtgtcctggtccatgtggtgcacgtgtctccacctccaaggagaggctcctcagtgtgcacctcccccacatccgtcctctctgccggccccgggcgtctgagcagtcattccatgccagcacctctgcagcctgctgggcctcaggttctctgtgagggacctccccggccttcggcggaggtggagtaagctccgtcaaggcaggtggcttcgtcccttcctgtgagtgacaccagtgatgaaatggacccctccacacaggcatcctcagggcacagggccctgggggcaccttcctcctttcgtatttgttgagaaaaaaagtggcattgcgctcacaccaggatgctggagcagagctgacatgctcgggaaagggcagaggtcactgggggtgggaaggtcatccagtccagactcagcacctcgtgggctggtaaactgaggctcaaagtgctggtgccaggcctgaggcctcgcggtgacccctctctctggttcccagcacctgcctgagacctgccccaggcacccataacctggaattccctgtttccttgtccagggcctgaggaaatggctccccaggtctgtctctggatgctctgaggcagatgggcttgggggctctaggaggaggcagggactccagggtgtcaggaaggcaggggtgccgggtcccacccagtggagtaacaaactgtgggtggcgtttgggcctccccgccttccccactgggtgtgctggtgctggcgctgctgggtcagggctgcccgtgaccccagacaccactgtccatcctgtgaggctcccgtctgggcatgtcctgggtggattcctcctttctgttaagtagctacatgaggcaggggctcctggatccaaagcaaatgacaggaattccagagccaggtgcatccactcagggcagccagtgttggtggagctgcctctagcacatggaggagagtgaaagtcagcctgcccctctcacgagaaaagaacctggggatacctctcagcctccagcgttgcaagtgcaaggccagtggagttaatctgcaacgtgcacgagggcgtgtgtcagtggctgtgtgcaggagtgtgagtgagcaagagcaagagcgcatggctcctgctgtacctcaaggtgtgggctcctggtggctgctcagtgttcccaggggtgagaggcctcatgtatcctaggctgcctgagatttctgtgtgctgatcgcatcctcagtttcttgtccaccgcttcactggcaagagtcccaggctccaaggacaccctccctgcacatgattgggtgttaatggtggcctgggttgtgtcttcccctggggatgagggttgggtgtccatggtgccctgggctgtgtcctcccctagggatgagggtcgggcctccacgatgccctgggctgtgtgctcttatgggaatgagggttgggtgtccaagatgccctgggctgtgtccttccctggggatgagggttggatgtccaagatgccctgggctgtgtactcccctaggaatgagggctgggtgtccaagataccctgggctgtgtcctcccctggggatgagggttgggtgtccatggtgccctgggctgtgtcctcccctggggatgacggttgggtgtccatggtgccctgggctgtgtttccttggggatgagggttgggtgctatggcatcctgggcaggtgcttcctttctgcacaagggttgggtgaccatgatgtcctggcaatggcttccctgggttgcctcttttctgccatgtgggaagagcaggggaggtttagttggtctcagcacatcattctctcaggataagtagaagagtgtctgagctgtgaggccagtgctccagctttggaattgtcttccccaccctcacctccatcccatcaaagcccgacatgtcgtgtggcagcagcgaggtgggtgttggctgttctcttgggctgggggttagtcgtggacggggaaaggagagatgctggtcaaagggcatgaagtttctgctgatgggaggagtcagttcttttgatctgttgcacagcatggtgactatagttaacaataatgactatttcaaaattgctaaaagatgagattttaaatgttctcaccacaaaatgataagtgtgtgaggtgatggatatgccacttaccttgttttaatcatcccacaatatagacaggcattgtcactttgcattgtaccccaggaatcttcacatttgcttttttgtcaattaaaaatagagacacaaaaggagagaggggagagcaatagactcttcacggaaccgtgggcttctgcctccgggtaaaataaactgcaaaaaggattcccaggaaaccgttccctctttcagcccttggttacaggaagccggatttgggaaatctgcctggatgacattcacatgaacgggcacatacaggaaaacacggtaatgtaattagaatagtcagagaaaagtagccagaaatgacattcacatgaacgggcacatacaggagaaaacacggtaacgtaattagaatagtcagagaaaagtagccagaaatgacattcacatgaacgggcacatataggagaaaccatggtaacgtaattagaatagtcagagaaaagtagccagaaatgacattcacatgaacgggcacatacaggaaaacacggtaatgtaattagaatagtcagagaaaagtagccagaaatgacattcacatgaacgggcacatacaggagaaaacacggtaacgtaattagaatagtcagagaaaagtagccagaaatgacattcacatgaacgggcacatacaggagaaaacacggtaacgtaattagaatagtcagagaaaagtagccagaagaatttgcaacgtgcccttgtaacaccaaatttgatcagttttttaaaaaatgatcgttatgtaggtgattgagaagtaaatgtattcttttttaaggtaaaaatttggacccttatcatgcatacccccctctgtgctcttcaaatcaacatcattattaatatctgtacatttttgctcatctgagccagcacaggctgaggctgtcagaatggacaccttttggttgttgggtttctgtcagtttctggggtgaagctgcgtgattgagaacgtagctcttggctgccatctcggggattattaaggactgtgaactctatccacaagccatggcaatatctgtcccaccgaatgctccctctaacacactcttactcccgtgatgtgtgttaagggctccgatgatgctgaaaacagcacaggatgtgaaaaggcaggaacagttctgaagtcaaaggctgatgtcctgtttctctttccctctgtgaccgactcccttcccagtggtaacaagtacccacagcttggtttgaatttctgcacgctgttgtctgtgcactcgctcacacttacgcacacagcaggcatgtgggcgatgctgggtattttgtgtatgagtgggatgcacatacacacatctacatccatatcatgcccatgcatctgtaacttgcttttcccgtgtaagaacacttcttagagtttgttcaatgcatgtgtctgtgtgaatgattgaaggcatttctaacccattttaaagatggctacttaggaccatatggatgttgtactgatgtcatttgaccacgtccattgtttccatcttttgggctgttcttgtgtattttactttccatgtaacactgtgacattgagaattggtacctacaacagtctatttgctttacattaaatttgtaggctaatttgtgtaaaaaaaaaaaaaaaaa

SEQ ID NO: 2250 - protein, 77 aa, Homo sapien
MGLSHAVAGDLLLPATPCWTGAWASPGLCLGFVTQGLCRRAQSISPWEAQGCLLELCGPALAGELVVWVFRLYPSTS

SEQ ID NO: 2251 - DNA, 3263 bp, Homo sapien
ccagaaacagacctgggagtggaacagcagcagttaggagaggaccctgctggggtccaggagcccgcctgcctggctgcccaaccagctccaacactgctggaggcctccattctctgttcaggggaaggcccactggttagctcagagatggcttctgcgtgctttctcccttccgtcctagagaacacatattttctgtttcctcccttgccttctcccacttggacctgctcagagccctgtgtactctggtgtgtggcctctctcccctctctcttttcctccttctggattctttcctatcttcatccacaatctctaccctttatcttgccgttactctaccccgagactgccttctgccctgggtcccaccaaatagatcctgtccttcccttagtgaaaatgaggccacctcttggggaacagaagacgccccagtgaaaacagagtgcaaacctggcctggcatgggagcctccttctggccaatcaggcaggccagagaacagcagcggagggccctgtctttcaggcagacctcatggctgagtgagcctcccctgggcccagcaccccacctcagcatggtccaagcccatggggggcgctccagagcacagccgttgaccttgtctttgggggcagccatgacccagcctccgcctgaaaaaacgccagccaagaagcatgtgcgactgcaggagaggcggggctccaatgtggctctgatgctggacgttcggtccctgggggccgtagaacccatctgctctgtgaacacaccccgggaggtcaccctacactttctgcgcactgctggacacccccttacccgctgggcccttcagcgccagccacccagccccaagcaactggaagaagaattcttgaagatcccttcaaactttgtcagccccgaagacctggacatccctggccacgcctccaaggaccgatacaagaccatcttgccaaatccccagagccgtgtctgtctaggccgggcacagagccaggaggacggagattacatcaatgccaactacatccgaggctatgacgggaaggagaaggtctacattgccacccagggccccatgcccaacactgtgtcggacttctgggagatggtgtggcaagaggaagtgtccctcattgtcatgctcactcagctccgagagggcaaggagaaatgtgtccactactggcccacagaagaggaaacctatggacccttccagatccgcatccaggacatgaaagagtgcccagaatacactgtgcggcagctcaccatccagtaccaggaagagcgccggtcagtaaagcacatcctcttttcggcctggccagaccatcagacaccagaatcagctgggcccctgctgcgcctagtggcagaggtggaggagagcccggagacagccgcccaccccgggcctatcgtagtccactgcagtgcagggattggccggacgggctgcttcatcgccacgcgaattggctgtcaacagctgaaagcccgaggagaagtggacattctgggtattgtgtgccaactgcggctagacagaggggggatgatccagacggcagagcagtaccagttcctgcaccacactttggccctgtatgcaggccagctgcctgaggaacccagcccctgacccctgccaccctccggtggcccaggtgcctacctccctcaagcctgggaaggtgggtctggggaaagtgggccgagtgatctgggggtaccccttgggttggtgtggggaaggagtgcctccttagtggtgcttgcagtcacaggaagcagcagcagtaaggacaaggggccggattccaggtcttcaacactggccactcctctgcttcctctgttggccccagatggacagtaaggggaacctccaatgtctctctgaacttaaagacaggagctggcatttatgacagacaaagaaagaagcccaggtgtcctggtgttctctgagacactctttgtgagcttcagtttcctgttctataacatgaacataagtgcttagctgccatgagggaaaagtaatgagagaagtttctagaagccactccagccactccttcctggggctgacaaaagggtgattccaagatcatccttcacccgaggtcctgcccaagcacaggccagatgcaagaatggggaaaagtctggtcctgatctccaagtctcaacatcctatcagtgactctgctccctgaccacacatcggaagggctggatgaccccaatcaaaagaaagaacaaggactctggttacccttgcctccacccatgtgtcataagagtaggctacagaggtgaccaggcctggcagttgaaatctctggaagagggaacatgtggggactactcagaggcaaagaggagctgctcctgcctccatggttgctggccactcccaccaactactcttagggaggctaagcagtctctgttttgcttccatggctcaaataataccctgggtatgcaggacccactataccttgcatttgctgagtacacctagagagcttggctgtttccaaaaacaatcagggtcataaccatccatgcagacatggaggctcggctgaaccaggactcctcactgtctacctgagagaatgagcacccctcatccatctcagcatcaacacaatttccaggggacctcaggtctacctcaggactgaacgccacacctcaggattcctcctccttgaatctgagactggctgcccattctgagatggggatgaaggtaagatgccgcatcaccaggcacgccgcccctgacagctgccttgataccagctctctgtggaaacccccgaggagttggatctggagaacagctgggcctcctcactcaggacttctctcctgaagaacacgcagtgctaaaactgaggatgatttccctaatgcttctgcttggccttatggaggagctgctccttccttacagccttggggatggacttgcccacacctccacctcccctgagccctgtgagaggcacgactgtctatgccaatgaggctcggtggggggctctcaagtgcctgatcctgccctgggctcagagccagcccagagggaagcaactgcacagccccacaggccctccctggcactgtccccccaaccccatctcagagctcagagggtacaagctccagaacagtaaccaagtgggaaaataaagacttcttggatgactgac

SEQ ID NO: 2252 - protein, 360 aa, Homo sapien
MVQAHGGRSRAQPLTLSLGAAMTQPPPEKTPAKKHVRLQERRGSNVALMLDVRSLGAVEPICSVNTPREVTLHFLRTAGHPLTRWALQRQPPSPKQLEEEFLKIPSNFVSPEDLDIPGHASKDRYKTILPNPQSRVCLGRAQSQEDGDYINANYIRGYDGKEKVYIATQGPMPNTVSDFWEMVWQEEVSLIVMLTQLREGKEKCVHYWPTEEETYGPFQIRIQDMKECPEYTVRQLTIQYQEERRSVKHILFSAWPDHQTPESAGPLLRLVAEVEESPETAAHPGPIVVHCSAGIGRTGCFIATRIGCQQLKARGEVDILGIVCQLRLDRGGMIQTAEQYQFLHHTLALYAGQLPEEPSP

SEQ ID NO: 2253 - DNA, 936 bp, Homo sapien
gagggcgcgatcctggcgtcccccgacggcctggggccccaatccagaggcctgggtgggaggggaccaagggtgtagtaaggaagcgccttttgctggagggcaacggaccggggcggggagtcgggagaccagagtgggaggaaggcggggagtccaggttccgccccggagccgacttcctcctggtcggcggctgcagcggggtgagcggcggcagcggccggggatcctggagccatggggcgcgcgcgcgacgccatcctggatgcgctggagaacctgaccgccgaggagctcaagaagttcaagctgaagctgctgtcggtgccgctgcgcgagggctacgggcgcatcccgcggggcgcgctgctgtccatggacgccttggacctcaccgacaagctggtcagcttctacctggagacctacggcgccgagctcaccgctaacgtgctgcgcgacatgggcctgcaggagatggccgggcagctgcaggcggccacgcaccagggctctggagccgcgccagctgggatccaggcccctcctcagtcggcagccaagccaggcctgcactttatagaccagcaccgggctgcgcttatcgcgagggtcacaaacgttgagtggctgctggatgctctgtacgggaaggtcctgacggatgagcagtaccaggcagtgcgggccgagcccaccaacccaagcaagatgcggaagctcttcagtttcacaccagcctggaactggacctgcaaggacttgctcctccaggccctaagggagtcccagtcctacctggtggaggacctggagcggagctgaggctccttcccagcaacactccggtcagcccctggcaatcccaccaaatcatcctgaatctgatctttttatacacaatatacgaaaagccagcttgaaaaaaaaaaa

SEQ ID NO: 2254 - protein, 195 aa, Homo sapien
MGRARDAILDALENLTAEELKKFKLKLLSVPLREGYGRIPRGALLSMDALDLTDKLVSFYLETYGAELTANVLRDMGLQEMAGQLQAATHQGSGAAPAGIQAPPQSAAKPGLHFIDQHRAALIARVTNVEWLLDALYGKVLTDEQYQAVRAEPTNPSKMRKLFSFTPAWNWTCKDLLLQALRESQSYLVEDLERS

SEQ ID NO: 2255 - DNA, 968 bp, Homo sapien
gggggaagttgctggctgactgggcttgcgaggaaaccgcctcggagctgcagcgaaggccaaggaatcactgaagatcggcgagggaggacagggggttcatcatgggtggctttttctcaagtatattttccagtctgtttggaactcgggaaatgagaattttaattttgggattagatggagcaggaaaaaccacaattttgtacagattacaagtgggagaagttgttactactatacctaccattggatttaatgtagagacggtgacgtacaaaaaccttaaattccaagtctgggatttaggaggacagacaagtatcaggccatactggagatgttactattcaaacacagatgcagtcatttatgtagtagacagttgtgaccgagaccgaattggcatttccaaatcagagttagttgccatgttggaggaagaagagctgagaaaagccattttagtggtgtttgcaaataaacaggacatggaacaggccatgacttcctcagagatggcaaattcacttgggttacctgccttgaaggaccgaaaatggcagatattcaaaacgtcagcaaccaaaggcaccggccttgatgaggcaatggaatggttagttgaaacattaaaaagcagacagtaattcagtccattcttctcccctgaaatgaagactacatcacctctctccctttggaaacagtcaagtgtacttcacactactagatgttaaaactatatgattattggcatatactgactgactgcaatatttgtagtaaatagggaaaataagtatttagttggagggataatttgatcgaatcacctgaatgttctatgtaatgtaaaatattcttttcttgctttcttgtgttaaggtatatattctatttgtatggaattcttattcaaatacagttgtattaaagagtatactcctattggatgaaaaaaacct

SEQ ID NO: 2256 - protein, 181 aa, Homo sapien
MGGFFSSIFSSLFGTREMRILILGLDGAGKTTILYRLQVGEVVTTIPTIGFNVETVTYKNLKFQVWDLGGQTSIRPYWRCYYSNTDAVIYVVDSCDRDRIGISKSELVAMLEEEELRKAILVVFANKQDMEQAMTSSEMANSLGLPALKDRKWQIFKTSATKGTGLDEAMEWLVETLKSRQ

SEQ ID NO: 2257 - DNA, 2236 bp, Homo sapien
ggggactcaaggctggcctggctcaagtgaacagcacgtccaggaggcgacctcgtccgcgggtttgcattctggggtggacgagctgggggttcggtccgagcccggtgggaggctcccggagcgcagcctgggcccagcccaccccgcgccggcggccatggcaggcaccctggacctggacaagggctgcacggtggaggagctgctccgcgggtgcatcgaagccttcgatgactccgggaaggtgcgggacccgcagctggtgcgcatgttcctcatgatgcacccctggtacatcccctcctctcagctggcggccaagctgctccacatctaccaacaatcccggaaggacaactccaattccctgcaggtgaaaacgtgccacctggtcaggtactggatctccgccttcccagcggagtttgacttgaacccggagttggctgagcagatcaaggagctgaaggctctgctagaccaagaagggaaccgacggcacagcagcctaatcgacatagacagcgtccctacctacaagtggaagcggcaggtgactcagcggaaccctgtgggacagaaaaagcgcaagatgtccctgttgtttgaccacctggagcccatggagctggcggagcatctcacctacttggagtatcgctccttctgcaagatcctgtttcaggactatcacagtttcgtgactcatggctgcactgtggacaaccccgtcctggagcggttcatctccctcttcaacagcgtctcacagtgggtgcagctcatgatcctcagcaaacccacagccccgcagcgggccctggtcatcacacactttgtccacgtggcggagaagctgctacagctgcagaacttcaacacgctgatggcagtggtcgggggcctgagccacagctccatctcccgcctcaaggagacccacagccacgttagccctgagaccatcaagctctgggagggtctcacggaactagtgacggcgacaggcaactatggcaactaccggcgtcggctggcagcctgtgtgggcttccgcttcccgatcctgggtgtgcacctcaaggacctggtggccctgcagctggcactgcctgactggctggacccagcccggacccggctcaacggggccaagatgaagcagctctttagcatcctggaggagctggccatggtgaccagcctgcggccaccagtacaggccaaccccgacctgctgagcctgctcacggtgtctctggatcagtatcagacggaggatgagctgtaccagctgtccctgcagcgggagccgcgctccaagtcttcgccaaccagccccacgagttgcaccccaccaccccggcccccggtattggaggagtggacctcggctgccaaacccaagctggatcaggccctcgtggtggagcacatcgagaagatggtggagtctgtgttccggaactttgacgtcgatggggatggccacatctcacaggaagaattccagatcatccgtgggaacttcccttacctcagcgcctttggggacctcgaccagaaccaggatggctgcatcagcagggaggagatggtttcctatttcctgcgctccagctctgtgttgggggggcgcatgggcttcgtacacaacttccaggagagcaactccttgcgccccgtcgcctgccgccactgcaaagccctgatcctgggcatctacaagcagggcctcaaatgccgagcctgtggagtgaactgccacaagcagtgcaaggatcgcctgtcagttgagtgtcggcgcagggcccagagtgtgagcctggaggggtctgcaccctcaccctcacccatgcacagccaccatcaccgcgccttcagcttctctctgccccgccctggcaggcgaggctccaggcctccagagatccgtgaggaggaggtacagacggtggaggatggggtgtttgacatccacttgtaatagatgctgtggttggatcaaggactcattcctgccttggagaaaatacttcaaccagagcagggagcctgggggtgtcggggcaggaggctggggatgggggtgggatatgagggtggcatgcagctgagggcagggccagggctggtgtccctaaggttgtacagactcttgtgaatatttgtattttccagatggaataaaaaggcccgtgtaattaaccttcaaaaaaaaaaaaaaaaaaaa

SEQ ID NO: 2258 - protein, 609 aa, Homo sapien
MAGTLDLDKGCTVEELLRGCIEAFDDSGKVRDPQLVRMFLMMHPWYIPSSQLAAKLLHIYQQSRKDNSNSLQVKTCHLVRYWISAFPAEFDLNPELAEQIKELKALLDQEGNRRHSSLIDIDSVPTYKWKRQVTQRNPVGQKKRKMSLLFDHLEPMELAEHLTYLEYRSFCKILFQDYHSFVTHGCTVDNPVLERFISLFNSVSQWVQLMILSKPTAPQRALVITHFVHVAEKLLQLQNFNTLMAVVGGLSHSSISRLKETHSHVSPETIKLWEGLTELVTATGNYGNYRRRLAACVGFRFPILGVHLKDLVALQLALPDWLDPARTRLNGAKMKQLFSILEELAMVTSLRPPVQANPDLLSLLTVSLDQYQTEDELYQLSLQREPRSKSSPTSPTSCTPPPRPPVLEEWTSAAKPKLDQALVVEHIEKMVESVFRNFDVDGDGHISQEEFQIIRGNFPYLSAFGDLDQNQDGCISREEMVSYFLRSSSVLGGRMGFVHNFQESNSLRPVACRHCKALILGIYKQGLKCRACGVNCHKQCKDRLSVECRRRAQSVSLEGSAPSPSPMHSHHHRAFSFSLPRPGRRGSRPPEIREEEVQTVEDGVFDIHL

SEQ ID NO: 2259 - DNA, 2051 bp, Homo sapien
cggcgccgagtagccgggccgggccggagcgcgggcgcggcggaggcagctgcgcccggctcctcccctcccaggccccgccccccgcccgggccccggcgatggtgacacatgcggcggcggccgcgcggcaggaccatggttgagcgcgccagcaagttcgtgctggtggtggcgggctcggtgtgcttcatgctcatcttgtaccagtacgcgggcccaggactgagcctgggcgcgcccggcggccgcgcgccgcccgacgacctgtacctgttccccacgcccgacccccactacgagaagaagtactacttcccggtccgcgagctggagcgctcgctgcgcttcgacatgaagggcgacgacgtgatcgtcttcctgcacatccagaagacgggcggcaccaccttcggccgccacctcgtgcagaacgtacgcctcgaggtgccgtgcgactgccggcccggccagaagaagtgcacctgctaccggcccaaccgccgcgagacttggctcttctcccgcttctccaccggctggagctgcgggctgcacgccgactggaccgagctcaccaactgcgtgcccggcgtgctggaccgccgcgactccgccgcgctgcgcacgcccaggaagttctactacatcaccctgctacgagaccccgtgtcccgctacctgagcgagtggcggcatgtgcagaggggtgccacgtggaagacgtctttgcatatgtgtgatgggcgcacgcccacgcctgaggagctgccgccctgctacgagggcacggactggtcgggctgcacgctacaggagttcatggactgcccgtacaacctggccaacaaccgccaggtgcgcatgctggccgacctgagcctggtgggctgctacaacctgtccttcatccccgagggcaagcgggcccagctgctgctcgagagcgccaagaagaacctgcggggcatggccttcttcggcctgaccgagttccagcgcaagacgcagtacctgttcgagcggacgttcaacctcaagttcatccggcccttcatgcagtacaatagcacgcgggcgggcggcgtggaggtggatgaagacaccatccggcgcatcgaggagctcaacgacctggacatgcagctgtacgactacgccaaggacctcttccagcagcgctaccagtacaagcggcagctggagcgcagggagcagcgcctgaggagccgcgaggagcgtctgctgcaccgggccaaggaggcactgccgcgggaggatgccgacgagccgggccgcgtgcccaccgaggactacatgagccacatcattgagaagtggtagtggcggtggtggccacggggaggcctcttggggggtgtgggggataaaacaggacagacgacaggtccacccaagactgtcaagggatgagcatcccaaacctgctccacagaggtagctgcgtcctgaaaaaaaacagagcagggatgtagtggggctgggcagggatgggggcttgagaaatcaacaggtgcagcccagtgggtcagaggaaagcgtgctcgaaggatgccatggtcagggcagggcctccagagcaggtgttgtgcctggagctgctctcctggcctccttggatttatcgcaaaaactgaaggtttgcgcaagagacgaggacagcggaaagtggacctgccaggccgggagtgtgtccctcaccaactatgcacacagcactcgctcttaactcctctgtccgggctactaggagtgagaccagcttctggcaactgccccagctccaggccatcccatagcccctcctcttctggctgcccccaatgccccgaggcctggggagcccccagctcacccatctgtagctccctcaaagtcagggcccaccccatctgaggcagagaagactcgagtccagcccccaggaagcctgctcccctctctggcccatggtcctgcttcatgctttgggtcaggaggccaaagctgatgttcaggccccacccactccctacagtcctcagaccccg

SEQ ID NO: 2260 - protein, 401 aa, Homo sapien
MVERASKFVLVVAGSVCFMLILYQYAGPGLSLGAPGGRAPPDDLYLFPTPDPHYEKKYYFPVRELERSLRFDMKGDDVIVFLHIQKTGGTTFGRHLVQNVRLEVPCDCRPGQKKCTCYRPNRRETWLFSRFSTGWSCGLHADWTELTNCVPGVLDRRDSAALRTPRKFYYITLLRDPVSRYLSEWRHVQRGATWKTSLHMCDGRTPTPEELPPCYEGTDWSGCTLQEFMDCPYNLANNRQVRMLADLSLVGCYNLSFIPEGKRAQLLLESAKKNLRGMAFFGLTEFQRKTQYLFERTFNLKFIRPFMQYNSTRAGGVEVDEDTIRRIEELNDLDMQLYDYAKDLFQQRYQYKRQLERREQRLRSREERLLHRAKEALPREDADEPGRVPTEDYMSHIIEKW

SEQ ID NO: 2261 - DNA, 1596 bp, Homo sapien
ctgtgcgctgctgagctgagctggggcgcggccgcctgtctgcaccggcagcaccatgtcgctcatggtcatcagcatggcgtgtgttgggttcttcttgctgcagggggcctggacacatgagggtggtcaggacaagcccttgctgtctgcctggcccagcgctgtggtgcctcgaggaggacatgtgactcttctgtgtcgctctcgtcttgggtttaccatcttcagtctgtacaaagaagatggggtgcctgtccctgagctctacaacaaaatattctggaagagcatcctcatgggccctgtgacccctgcacacgcagggacctacagatgtcggggttcacacccacgctcccccattgagtggtcagcacccagcaaccccctggtgatcgtggtcacaggtctatttgggaaaccttcactctcagcccagccgggccccacggttcgcacaggagagaacgtgaccttgtcctgcagctccaggagctcatttgacatgtaccatctatccagggaggggagggcccatgaacctaggctccctgcagtgcccagcgtcaatggaacattccaggctgactttcctctgggccctgccacccacggagggacctacacatgcttcggctctctccatgactcaccctatgagtggtcagacccgagtgacccactgcttgtttctgtcacaggaaactcttcaagtagttcatcttcacccactgaaccaagctccaaaactggtatccgcagacacctgcacattctgattgggacctcagtggctatcatcctcttcatcatcctcttcttctttctccttcattgctgctgctccaacaaaaagaatgctgctgtaatggaccaagagcctgccggggacagaacagtgaacagggaggactctgatgatcaagaccctcaggaggtgacatatgcacagttggatcactgcgttttcacacagacaaaaatcacttccccttctcagaggcccaagacacctccaacagataccaccatgtacatggaacttccaaatgctaagccaagatcattgtctcctgcccataagcaccacagtcaggccttgaggggatcttctagggagacaacagccctgtctcaaaaccgggttgctagctcccatgtaccagcagctggaatctgaaggcatcagtcttcatcttaggggatcgctcttcctcacaccacaaatctgaacatgcctctctcttgcttacaaatgtctaaggtccccactgcctgctggagagaagacacactcctttgcttagcccacaattctctatttcacttgacccctgcccacctctccaactgaactggcttacttcctagtctacttgaggctgcaatcacactgaggaactcacaattccagacatacaagaggctccctcttaacatggcactgagacacgtgctgttccaccttccctcatgctgtttcacctttcctcagactattttccagccttctgtcagtcagcagtgaaacttataaaattttttgtgatttcaatgtagctgtctccttttcaaataaacatgtctgccctc

SEQ ID NO: 2262 - protein, 375 aa, Homo sapien
MSLMVISMACVGFFLLQGAWTHEGGQDKPLLSAWPSAVVPRGGHVTLLCRSRLGFTIFSLYKEDGVPVPELYNKIFWKSILMGPVTPAHAGTYRCRGSHPRSPIEWSAPSNPLVIVVTGLFGKPSLSAQPGPTVRTGENVTLSCSSRSSFDMYHLSREGRAHEPRLPAVPSVNGTFQADFPLGPATHGGTYTCFGSLHDSPYEWSDPSDPLLVSVTGNSSSSSSSPTEPSSKTGIRRHLHILIGTSVAIILFIILFFFLLHCCCSNKKNAAVMDQEPAGDRTVNREDSDDQDPQEVTYAQLDHCVFTQTKITSPSQRPKTPPTDTTMYMELPNAKPRSLSPAHKHHSQALRGSSRETTALSQNRVASSHVPAAGI

SEQ ID NO: 2263 - DNA, 2871 bp, Homo sapien
ttttttttgctttttgcagatttgaaatttaattaagctattaacttcttaatcatcacatcctccaactctgttttaactcccccctccccctcccctttttttttaaggaataaagggattcattcctcattttaactgatgttacagtgaagatgggttcttgaactcttggaagcctggatgagccacctaatctcaaagataaaaaccaaagaccaatgcgtattggggaaaagaatgcttagtactgcaagactgttgaatacctgttgaatattcctattgaggttttttcctaaacatacttcagtaacatcttaccggacaattgcactggagaaatgttgatccctggctggaatgtcataccattgacccatttgaagagttaaagctggatttgactgctctattctaccaggaatattgttagggtagccttttccagtttctaaacaattgtaatcatttattgactcagcaattcctcagataacaggtcaaaagatgtacagatacattctgaagttttcttgctattaaaggcacaagagtttccttgtattttgactgacaatgtagcatgtttccatttagtttgttagtgaggtggttttccctttgaaagccatttggtatattcaccataacaattagtttaatatgattacataagaaaactatgataaaacccagcaattttagtagttgtgaaaatacgttttttaaatcatgtttaagaagaattgcaagacttgaaaccaaatcctgatgggggaattctgtttaatcctgtttaatctgtttaatttctgtttaatccttagtttcttaacctgcatagcttatcctgtattgtactttttttcttttttaaactcccaaacaagaagcttgaaactttttctgtattttaaaattgaaatttggtcacagggtatagtcagatttttattaaggtttggtttgacaacctttaaagaaaggtttacctcgctaatacttcttaataacatgcatcaaatgatattccctatggtgaagtatatctcaaagttatgtatctttcatttttggcatttggtgcttatggacttagtacccaggcaacaaagatctattatcacctactctcttgtattcgctattatttcccaaaaaaaaaaaaggggcatatatcataagaataatattagaattattttgtttctcccacaagcccatggtagagatttctatgttcccattctccctttcactcagagttatgttgactgggggcggtggctcatttgggaagccaaggcgggtgaatcacttgaggtcaggagttcaagaccagctagccaatcacggcgaaactccgtctctactaaaaatataaaaattagtcccgtctctactaaaaatataaaaattagtcagacgtggtacctgtttggtggtgtgcatctgctagtcccaactactcgggacgctgaggcaggtgaattgcatgatccaggaggcagaggctgcaatgagctgagatcatgccactgcactccagcctgggtgacaagtgagactgtctcaaaaaaaaaaaaaaaaaaaaaaaaaaaaaaaacaagggtccttacttgcattaatgcatccacattattccatgtactcaccaggattttttgttataaacaaaaatacccactctggttacttattaaaagattatcagtcaatttacaaaaacaacaggaagatttacaaagaaaaaaaaaacaaaggaagcaagaacatccagaactcacagcacagaatactgtgcttaaaatgctgctgcaaggagtattaattaacttataccctactgtgacacttaacaggccaggtgtggtggctcacgcctgtatcccagcactttgggctgaaggcggagtacacttgaacccaggacagcctgggcaacatggtgagaccccgtgtctacaaaaaataaaaaagccgggagtggtggcaagctcctatagttccagctacttgggagactgaggtggagggatcacttcagcctgggaggtcaaggtcacagtgagctataatcaagccaccgcactctggcctgggcaacagagacagtctcaaaaagaaaaaaaaaaaagcacttaacacactttatgaatacaatatggcacatctatctgcccattagagtgagactcctgagtattttactcatctttccattctcaaatgcaaagagtatgtggcatataataactgtccgaatgtacgactgacatcttaaagcgtgtcggtcggcaaactttttcgtaaagggccaggtaagtaaacattataagctttgtaatccacacagtctctgttcaaaccattctactgttgtagcaggaaagcagccatggataatatgtaaacaagtcagctacgatgtgttcaaataaaactttataaaaacaggcagtaggctgggtttagcccatggaccacaatttgccaagtatttaacaagaatcaacacttttcctttcataatttaattgaagttggtacctacaaagatatgagctcactactacatatgactatctgtaatggatcaattttggatatgactttgggtgggggtaaaaaaagaaccgaagacatgtaatatagatgaataatgaaaataacagggctgggtgcagttgcctgcactttaggaggctgaggcaggagcatctctggaacctgggaggcagaggttgcagtgagccaagattgcgccattgcactccagccaaggggacaagagcaaaaacaaaaacaaaaacaaaaacctttaaggtaccagcctggctaagcagttaacatacctcactttatcag

SEQ ID NO: 2264 - protein, 418 aa, Homo sapien [sequence omitted]

SEQ ID NO: 2265 - DNA, 2963 bp, Homo sapien
gcggccgcgtcgactgtgacactgccagcagcgcgcagagggagggatgggggcgggtatcggcgtaggggccctcggaaagaacggatattgctgtgacaccgcggggacgctctgaagggacgagtgtcggtgtggcaccggtgcacgctgaaggagccggcggaaccgggtggccatggggatgtgggcatcgctggacgctttgtgggagatgccggccaagaagcgtatcttcggggccgtgctgctcttttcctggacagtgtatctttgggagaccttcctagcacagcggcagagaaggatatataaaacaacaactcatgtaccaccggagttaggacagatcatggattctgaaacatttgagaaatctcgactctatcaactggataaaagcactttcagcttctggtcaggactctattcagagactgaaggcactcttattcttctctttggaggaataccttatctctggagactttctggacggttctgtggttatgctggctttggaccagaatatgagatcactcagtccctggtgtttctgctgttggctacacttttcagtgcattgactggtttgccatggagtctttataatacttttgtgatagaagaaaaacatggcttcaatcaacagactttggggttcttcatgaaagatgcaatcaagaaatttgttgtgactcagtgtattttgttgcctgtgtcttcacttctactttacattattaaaattgggggtgactatttttttatttatgcctggctgttcacattagttgtgtctctggttcttgtcacaatctatgctgattatattgcccctttatttgacaaattcacacctctgcctgagggaaagcttaaagaagaaattgaagtaatggcaaagagtattgactttcctttgacgaaggtgtatgttgtggaaggatctaaacgctcttcccacagcaatgcttatttttatggcttcttcaagaacaagcgaatagttttgtttgacactctactagaagagtactctgtactaaacaaagacatccaggaggattctggcatggaaccccgcaatgaggaagaagggaacagtgaagaaataaaagctaaagttaaaaataagaaacaaggatgtaaaaatgaggaggtactcgctgtactaggccatgaactggggcactggaagttgggacatacagtcaaaaatatcattattagccagatgaattctttcctgtgtttttttttatttgctgtattaattggtcgaaaggagctttttgctgcatttggtttttatgatagccaacccactcttattggactattgatcatcttccagtttattttttcaccttacaatgaggttctttctttttgcctaacagtcctaagccgcagatttgagtttcaagctgatgcatttgccaagaaacttgggaaggctaaagacttatattctgctttaatcaaacttaacaaagataacttgggattccctgtttctgactggttgttctcaatgtggcattattctcatcctccactgctagagagacttcaagctttgaaaactatgaagcaacactgagatgtccaggatctgtgactgaagacatttctgattatttctgtcctggcagcatgttccagctcttgatgtttttaaactttttttagaagaaaaattaagtacagaaaagcccagatttaaatacatttaatatgtcattttaaaaatgattttaataattcatttcttaaaacactgaatgaattttgaagcttaatgtttttaaaggcatagttttatctttgacatctaatttaccatcaagttgtaaaattatttggaaaaatacagaactcgttttatttgtatacttatatggaatctgcatgtgaggtgtttgagggcatatgtttgaaagagggagcatcaccacaggaatcctttctgtgaggtggaaacagtggtcctgaatcattgtgctcacacctaacttgaaatctggtcttactttcatgctgttatgatttcacctggtgaatcagtgttttaaataagaaaggtaatagttggtaaggccaatgttatttaaatgaaagtagttagaaaaatgctctcctattctaccaaatttttaatttctttcttccctttcttgctacacagtgatcaagagtttctcatagtgctttgaagttagaaattatgtataggatattttaaatcattgagttttgtggggtttttttgtttgtttgtttcttttgttttttggaaaatccgtgtctttatctttttttcccacgtggtagatatgatcccattggaggtaaattgtagcttcttctcattcatgcagtaaataatacatcctttcactcagcagagatggccatattaaacacgttttgctatgttaaaagtggcagaacaggaaagacgaattaaaaataacattttttaagcgacataaggatgaaatactgatgaatctctgtgacattacagggaaaaaaatatagttttctatctctttcaagggcagaagagttttcatttttatttttgtaatttatctgtaagtcataaatattacttaatcaggcctgattctacttttgaaaattacagttcttgaaatgcagataatgtttactttgaaaacaaatgtcatgaatgatttccagtttttaaagctatatgtttcactgcttcatatctctgtccactttctgaatgagaacttattttgtgcctagagctctcactcactgataatgcttattaccttctgggcatttattccaaagtgggatcaactgtacgcctttggtatctgaccataaagtcttttgctccgctgacatttgggtgatgtcttcacatggaaatataataaaaataaaaatctagtttaaaaaaaaaaaaaaaaaaaaaa

SEQ ID NO: 2266 - protein, 475 aa, Homo sapien [sequence omitted]

SEQ ID NO: 2267 - DNA, 5744 bp, Homo sapien
agcgcatggagccagaggaggaggatgaactaggctcagggcgggatgtggattccaactccaacgcggacagtgagaaatgggtggcaggagatggtttggaagaacaggaattttctatcaaggaggcaaacttcacagagggaagtctgaagctaaagattcagaccacaaagcgggctaagaaacccccaaagaatttggagaactatatatgtccacctgagatcaagatcaccatcaagcagtctggggaccagaaggtgtcccgtgctggaaaaaatagcaaagccacgaaggaggaagaaagaagccactccaaaaagaagctcctcacagccagtgaccttgcagccagtgacctcaaaggatttcagccacaggcttacgaaaggccccagaaacattcaactctccattatgacacgggcctcccacaggacttcaccggtgacaccttaaaaccaaagcaccagcaaaaaagcagcagccagaaccacatggactggtccaccaactctgacagcggacccgtcactcagaattgcttcatcagtccagagtctggcagagaaactgcaagcaccagcaagatccccgctcttgagcccgtggcttcctttgcaaaggcccagggtaagaaaggcagtgcagggaacacgtggagtcagttgtctaacaataacaaagatctgctcttgggaggtgtggctccatccccaagcagccacagctcaccagccccacccagcagctctgctgagtgcaacgggcttcagcccttggtggatcaagatggaggaggtacaaaggagcccccagaaccacctacggtgggcagcaagaaaaagtccagtaaaaaagatgtgataagtcagaccataccaaacccagacctggattgggtcaagaatgcccagaaagcatttgacaatacagaagggaaaagggaaggttattccgcagatagtgcccaagaggcatcaccagccaggcagaacgtgagttctgccagtaatcctgaaaatgactcaagtcatgtccggattactatccccatcaaggcaccctctctggatccaaccaaccataagaggaaaaaaagacagtccattaaagcggtggtggaaaagatcatgccagagaaagccttggcttctggaatcaccatgagcagtgaagtagttaacaggatactttccaactctgaggggaataagaaggatccccgtgtccctaagttgagtaaaatgatagagaatgagtccccctcagttggccttgaaactggtggaaatgctgagaaagttatcccaggaggtgtgtctaagccgcggaagccacccatggtcatgacacctccaacgtgcacagatcactctccatccagaaagctgccagaaatccagcatccaaaatttgctgcaaaacgaaggtggacttgcagcaaaccaaaacctagcaccatgcttcgagaggcagttatggccacctctgataaactgatgctggagcccccgtctgcatatcccatcaccccatccagccctctctacaccaacacagacagtcttactgtgatcactccagtcaaaaagaagcggggacgaccaaagaagcagcctttgctcacagtcgagacgattcatgagggaacttccaccagccccgtcagtcccatcagccgagagtttcctggcactaagaaaagaaagcgacgacgcaatttagcgaagttggcccagctagtgccgggagaggacaaacccatgagcgagatgaaatttcacaagaaagttggaaagctcggcgtgttggataagaagaccatcaaaactatcaataagatgaagacactcaagaggaaaaacatcttgaatcagatcttgtcctgttccagcagcgttgctctgaaggcaaaagctcccccagagaccagccctggggcagcagccattgaaagcaaactgggcaagcagattaatgtcagcaagaggggaaccatctacattggcaagaagcggggcaggaagccaagagcagagctgccacccccatccgaagaacccaaaacagccatcaagcaccccaggcctgtttctagccagccggatgttccagccgtgccttccaactttcagtcacttgtggcgtcttcaccagcagctatgcacccactttcaacacagttaggtgggtccaatggcaacctgagccctgccagcactgaaaccaatttttcagagttgaaaactatgccaaatctccagcccatcagtgctcttccaaccaaaacccaaaagggaatacacagtggaacctggaagctgtctccacccagactgatggccaactccccttcacacctgtgcgagattggctccctaaaggaaatcacgctgtcccctgtgagcgagtcccacagtgaggagacgatccccagcgacagcggcattgggacagacaacaacagcacttctgaccaagcggagaagagctcagaatcccgaaggaggtactcttttgatttctgctccctggacaacccggaggccattccgtccgacaccagcacaaagaaccggcatggccaccggcaaaagcatctcattgtggacaactttctggcccacgaaagcctcaagaagccaaagcacaagaggaaacggaaaagcctgcaaaaccgcgatgacctccagtttctggcagacctggaggagctaatcaccaagttccaagtgttcagaatctcccaccggagttacaccttctaccacgagaatccatatcccagcatttttcggattaattttgatcactattacccggtgccatatatccagtatgacccgttgctctatcttcgtaggacttcagacttgaagtcaaagaagaagcgtggtaggcctgcaaaaaccaatgacaccatgacaaaggtgccttttttacaagggttcagctaccctattcccagtggaagttactatgcaccctatggaatgccttacacatcaatgcctatgatgaaccttggttattacggtcagtacccagctcctttgtacctatcgcacacgcttggagcagcttccccattcatgaggccaacagtgccaccacctcagttccacacaaactcccacataaagatgtccggtgcagctaagcataaagccaagcatggagtacacctgcagggacctgttagcatgggccttggtgacatgcagccttctctgaaccctcccaaggtaggcagtgccagtctgtccagtggtcggctccataagaggaaacacaaacacaagcataagcacaaggaagaccggatcctagggacccatgacaacctgagtggtctttttgcaggcaaagccacaggcttctccagccacatcctgagcgagcggctgagtagcgcagacaaagagctcccgctggtgagtgagaagaacaagcataaggagaaacagaagcaccagcacagcgaagccggccacaaagcttctaagaacaactttgaggtggacaccctgtctacactgtcactttccgacgcccagcattggacacaggccaaggaaaaaggagacttgagcagtgagcctgtggactcatgcacgaaaagatactctggcagtggcggggatggtggcagcacgagatcggagaacctggacgtgttcagtgaaatgaacccttcgaatgacaagtgggacagtgacgtgagtgggagtaaaaggaggagctatgaaggctttggaacgtacagggaaaaggacatccaagccttcaagatgaaccgcaaggagagaagttcttatgactcctccatgtctccagggatgccaagtccccacttaaaagtggaccagacagcagtgcatagtaagaacgaaggctcagtgcccaccatgatgaccaggaagaagccagccgcagttgacagtgttacaattccaccagccccagtgttatctctccttgctgcatctgcagcaacgtcggatgcagtcggctcctccctgaagaagaggttcaagcggcgggagatcgaagccatccagtgcgaagtgcggaagatgtgcaactacaccaagatcctgtccaccaagaagaacctggaccacgtgaacaagatcctgaaggccaagcggctgcagagacaatcaaaaacaggcaacaacttcgtgaagaagaggcgcgggcgtcccaggaagcagcccacccagttcgatgaggactccagagaccaaatgccggtgctggaaaaatgcatcgacctgcccagcaaaagaggccagaagcccagcctgagcccgctggtgctggagcccgccgccagccaagacaccatcatggccaccatcgaggcggtcatccacatggcccgggaggcgccgcccctgcccccgccaccgccgccgcccctgccgccaccgccgccaccacccctgcccccgccaccccctctacccaagaccccccgaggcggaaagaggaaacacaaaccgcaggcccccgctcagcccccacagcagtcgcccccgcagcagccccttccccaggaagaggaggtgaaagccaaaaggcagaggaagtcccgagggagtgagagcgaggtccttccctagggcgggtctgggcgtctgcacctggggcctagggaactgacacgtgggaagcgcagtgagccggggcgggggcggaatcccccgctgcagggacacccacgcccttctctccagaagccgggcaggcagaatccggccagacgacggggctgagccatcaggagctcttgggaaagcaaagcagggagacaccttcagaagaagcttgtctgagcttcaccgcagctcccaccacgcggcgcttcagtacggctggatcctccgcaggcgagcggaaggcccccaggaggagcaggctggtggcactctcctgacctcacgctgccaaggtgcgccctcgactcccgatttcatttgctggccaggaaaatcgaaagggaaacaccctcaattaggaaacattccaaggggagaaaagctgcaaattgctcaactggcattgctgtaacccgttccatttaattggtttttatttcttttgattttcaagctctgctaagctttggggtaccaacgtcatcttcaggtgacctgaatctttcccttaaccgtacagtttctcgatggaattgtgtgatcagaaggtggaattctagtgataggcgacctcagacccgcattcatgttctgtgtgcctcttctattgcacatacactgatttttagcattgtctattcctatttttcctttgcccattgtacttccatatatcttttcattaacttacttgctgccttttttttttcttggtacacatttaaataaagtaatccttaacctgtgctgtaaagttcacccttggcatgctgttccaagaacctgggtttgaatcccaatcgttgtgaaacatactcagtattgataaaacctttttaataagtgatgcagagcagccaaggatatgttgacccagatgtcaaccaggctatttttatacttaaaacatgtcagcagagcataggcagaataaaatggtttaaataccccacagcaaatagagtaactgacaaaccaccaaaaactgaaaccccagacccaccagaaagacaagtgtctagcaatgccttggtacctgatctttttcattcaaataattgtcataggttgttc

SEQ ID NO: 2268 - protein, 1542 aa, Homo sapien
MEPEEEDELGSGRDVDSNSNADSEKWVAGDGLEEQEFSIKEANFTEGSLKLKIQTTKRAKKPPKNLENYICPPEIKITIKQSGDQKVSRAGKNSKATKEEERSHSKKKLLTASDLAASDLKGFQPQAYERPQKHSTLHYDTGLPQDFTGDTLKPKHQQKSSSQNHMDWSTNSDSGPVTQNCFISPESGRETASTSKIPALEPVASFAKAQGKKGSAGNTWSQLSNNNKDLLLGGVAPSPSSHSSPAPPSSSAECNGLQPLVDQDGGGTKEPPEPPTVGSKKKSSKKDVISQTIPNPDLDWVKNAQKAFDNTEGKREGYSADSAQEASPARQNVSSASNPENDSSHVRITIPIKAPSLDPTNHKRKKRQSIKAVVEKIMPEKALASGITMSSEVVNRILSNSEGNKKDPRVPKLSKMIENESPSVGLETGGNAEKVIPGGVSKPRKPPMVMTPPTCTDHSPSRKLPEIQHPKFAAKRRWTCSKPKPSTMLREAVMATSDKLMLEPPSAYPITPSSPLYTNTDSLTVITPVKKKRGRPKKQPLLTVETIHEGTSTSPVSPISREFPGTKKRKRRRNLAKLAQLVPGEDKPMSEMKFHKKVGKLGVLDKKTIKTINKMKTLKRKNILNQILSCSSSVALKAKAPPETSPGAAAIESKLGKQINVSKRGTIYIGKKRGRKPRAELPPPSEEPKTAIKHPRPVSSQPDVPAVPSNFQSLVASSPAAMHPLSTQLGGSNGNLSPASTETNFSELKTMPNLQPISALPTKTQKGIHSGTWKLSPPRLMANSPSHLCEIGSLKEITLSPVSESHSEETIPSDSGIGTDNNSTSDQAEKSSESRRRYSFDFCSLDNPEAIPSDTSTKNRHGHRQKHLIVDNFLAHESLKKPKHKRKRKSLQNRDDLQFLADLEELITKFQVFRISHRSYTFYHENPYPSIFRINFDHYYPVPYIQYDPLLYLRRTSDLKSKKKRGRPAKTNDTMTKVPFLQGFSYPIPSGSYYAPYGMPYTSMPMMNLGYYGQYPAPLYLSHTLGAASPFMRPTVPPPQFHTNSHIKMSGAAKHKAKHGVHLQGPVSMGLGDMQPSLNPPKVGSASLSSGRLHKRKHKHKHKHKEDRILGTHDNLSGLFAGKATGFSSHILSERLSSADKELPLVSEKNKHKEKQKHQHSEAGHKASKNNFEVDTLSTLSLSDAQHWTQAKEKGDLSSEPVDSCTKRYSGSGGDGGSTRSENLDVFSEMNPSNDKWDSDVSGSKRRSYEGFGTYREKDIQAFKMNRKERSSYDSSMSPGMPSPHLKVDQTAVHSKNEGSVPTMMTRKKPAAVDSVTIPPAPVLSLLAASAATSDAVGSSLKKRFKRREIEAIQCEVRKMCNYTKILSTKKNLDHVNKILKAKRLQRQSKTGNNFVKKRRGRPRKQPTQFDEDSRDQMPVLEKCIDLPSKRGQKPSLSPLVLEPAASQDTIMATIEAVIHMAREAPPLPPPPPPPLPPPPPPPLPPPPPLPKTPRGGKRKHKPQAPAQPPQQSPPQQPLPQEEEVKAKRQRKSRGSESEVLP

SEQ ID NO: 2269 - DNA, 1083 bp, Homo sapien
gccgcttttttttttttctcatctgccatttgtgtgtcttagatgggttttaattgcatgaatgtggctaatgtggttctcagaaattggtcagtatggcccgacatagcttctgctctgtcttgctgactcaatacctttaggatttgtatcagagtttggatactagtgttagtggtggtgtcaccactacttaattgggagataatgaaaccaatcatggatgctgtttttattgggcatgtcatctaagagaggagaaatagctgggttttgggtctaattatgaataaggactgattcagaaaacgagtttatggtaggtagactaaagtttcacatcagactgtaccattgtgatttagacctatctaaaattcagagcatatcatctgggctacctcagggtcaccacccatgtattgggcttagtcaggattgacagatacattctcagctggcctgtcatataaaacatactgtcattgagcttaagctccgcttgttctgaggtttcacctccatgtgtttcattggtgcaaaagtggatctcttagttggtcacttaattctttctttttcagaaagatagtatgttcactggtatatttggtcactcttagaaccttccttcacattgttttttatgggacccatgaatggttagcctttcttttctattgtagaaggaaataaataggagtaaaaagaccattgtagtaaataagttcaaggggaacttgggaccagaaaccactgttatgtacaaaaaaatggcaaattcaataaactcaaatttaaaataatttttaaattaacagttatgataaattttatattttatacaaatagattgcttagaatggttctcaagaattataagagaaatgaactcacagtacaaaaattttataattactatacttgtgttttgtttgggggctgggaaatgtatttttacattgtagccaatcattttatatttgtcaatttaaatcttatgggtctttttttttttatctctcttgatgtcagattttatagtctttttaaataaatccatttaattaaaacgttaaaaaa

SEQ ID NO: 2270 - protein, 77 aa, Homo sapien
MINFIFYTNRLLRMVLKNYKRNELTVQKFYNYYTCVLFGGWEMYFYIVANHFIFVNLNLMGLFFFISLDVRFYSLFK

SEQ ID NO: 2271 - DNA, 2619 bp, Homo sapien
gattttagaagaaaacccttttgtcaacaattttgtgtacatatttggcattttcagttctgtacgcatctgcgggttgcagcccacgccgcttactctcagcggatgcagctgctcacttgggggcactggcctcttaggttttaacgatgtcaacagtgtagtttagaaaatggcccgttagtggctctattgcaataatgttagggacattatatgatttccacgcaggtcacaccatctgggcctgaggtagcagtgggtcactttgatccactttgcaggacttattctgtaacggtttgtggccaagttttgggaagtggttgattctctttgccttcatttcaccttcctcttcgtttacggttaggacatcgctgcttgatccttacaatactgtgcaactgcaatgcaacgtggccctgcttcaggtgatccgcgggaggggcctccacgccagcgccgggaaggctgctggggcctccacacctgcctcatcacggcggcgaggctacgacaatccggctgggagcatgaccttggcgtctgttctgggagcacggatgataagctctggaagctggcagtgtgtaaagcactggcaagtttgttactgttaaaatgtcaaataccaatgctttatatcgacgcgaagtgcttaacacagccgggcttgggggcagtcaggaggaagctggccatccgtggaggaggggccggtcctggactcccgcaggactcctctgaggcagggcctgaagtctgtacacgtggtccagatttgtccttgtcttttcttcacactgagttctctatatttattgaacatcttgtccttttaagccagagtagtgtaaactgcgtctcggatgtctgtcttttgcctcgaagccacgatggatcgctggtttcctctgcagcgcgagggctccggcgaccagaggattcttcccggaaggcattcctgccgcgctccccggggcacccctcaattgtgtactacgtccttgtttagtgtgtatccgtgcccacgtagatgatgtctgtaacgtagttttgtttgaaatatgagaatatgcggcttaaactttgatctgtaaggagcggggccgtggccgtttggagcacgctgtagacaccgttcctcatgctgccgggtgggttttgcagaagctcccttagtgatttcatgtttaacaggcagcatccatttccagaatttcctggcattgatttatattttgaagcatacaggaaacttctcgtttcctcgtttagccccacccagatcaggtgaaagggcagctttaatggtggtttttatggaccacattatcagagagcactgtgcaagccaaatggttcaataatgaatgaaaattctgggtgtaaagagtaaatatgccctggctctttctaccaatgtttgctcctggttggaaagaaaccaaagatttaagacgggctgctcttccagactggctgtgcctgcctgtgcccagcaacctgtgcagccggcagtgtgcctggtgtcacgccaggaggctgtggctgctgtgggccctctggaattgtgctcctcacaaagtttccccaaaaggttcttctaagcctttattgtccctggtaaatgtttcccggctgggcgcggtggctcacgcctgtaatcccagcactttgggaggccgaggcgggtggatcacctaaggtcaggagtttgagatcagcctgcccaacatggtgaaacctcgtctctactaaaaatacacaacttagccagtcttgttggcgcacgcctgtaatctcagctactagggatgctgaggcaggagaatcgcttgaacccaagaaagaggtggaggttgcggtgagccaagattgcgccactgcactccagcctgggcaaacagagggagactccatcgccccccccaacaaaaaaaaaagtttcccatacactggcctgccccaaaacccactaacaattttagcaaaacagtccaggccaaagaggaagcatttcatgttcaataagaaacccagccattccgcatggctggttcctgagtggctctggtgatactctccagccacctgctgacattcagaatctcagacctcgggactgctgttgcggtaccgtgtgtctgacacctgccagcagccctttgctatctgcgcgcaggatgggggtgactgcccagacattcccgctagataggctctgatttccggggcagcctttcagatgcggcagacatacaacacctgtactttagagttttaagggaaaaaaaatcagaagtgctggttagatagtaaaaacttaggataacttagaaaggctagttttagcttcctttgtggctccctggtgcaaaacaattagcagttatgcaatggacctgattctagtttattctaattaagaagtgaggccgagtttgacttcgttcctgaatacaatcttgagtaactgggaaagtctgagtgaaaggatggcctcattctctttctaatcttgctggtttcaagattagaaaatggcattatttgatctgaaatgtttgagaagacacgaataaagttacttgggcagaaaaaaaaaaaaaaaaa

SEQ ID NO: 2272 - protein, 201 aa, Homo sapien
MQRGPASGDPREGPPRQRREGCWGLHTCLITAARLRQSGWEHDLGVCSGSTDDKLWKLAVCKALASLLLLKCQIPMLYIDAKCLTQPGLGAVRRKLAIRGGGAGPGLPQDSSEAGPEVCTRGPDLSLSFLHTEFSIFIEHLVLLSQSSVNCVSDVCLLPRSHDGSLVSSAARGLRRPEDSSRKAFLPRSPGHPSIVYYVLV

SEQ ID NO: 2273 - DNA, 2450 bp, Homo sapien
gccggcattcatttaaggcctaaggatgaaggcgagaagaaataaaaaacagatcccaagctttcgcaagttaataaaaactagtaaagtcaaacttgaaaacaagctaaaaaataagcagtttaaacaacaaagcactctcaagaagtaccgaaaagaacagaggaaactaaggcaagctgtgaaagatgctgtgtctaagaaacccattccattggagaacccaaaggaaaagcgaccaggtaaaaggattgagagggaagaagaggaagaagaagaagcccttcctttagatatgatggatgaagatgacttacagttaatgaaggatttaggacaaagagtatcttttctaacaagagatctttcttctagtgagcctgttcatgcgaagaaacggaagcatgaacgcattatagataaatatgaaaaaataccaagaactctgcaaactgcaccagagaaggaactgattcatttacttcctatcaaagataaaagtggtataatcccacagactagggagaagccagttactgatagtaacaaagatgaagaggatcaagaagaagagagggaacttgaggaagagatcattgaagatcctattcaagagctgaccatagaagaacatttgattgagagaaagaagaaattacaggagaagaagatgcatattgcagccttggcatctgccatattatcagatccagaaaataatattaaaaaattgaaagaattacgttctatgttgatggaacaagatcctgatgtggctgttactgttcgaaagctggtaattgtttctctgatggagttatttaaagatattactccttcatataaaatccggcccctcacagaagcagaaaaatctactaagacccgaaaagaaacccagaagttaagagaatttgaagaaggcctggttagccaatacaagttttatttggaaaatctggaacaaatggttaaagattggaagcagaggaagctgaagaaaagtaatgtagtttccttaaaggcatacaaaggactggcagaagtcgctgtgaagagcttgtgtgagctgttggtggcactacctcattttaactttcacaacaacatcatcgtattgattgtccctctcatgaatgacatgtcaaaattgatatctgaaatgtgttgtgaagctgtgaagaaactctttaagcaagataaattaggccaggcttctcttggtgtaattaaagtgatttctggttttgtgaagggcagaaattacgaagttaggccagagatgttaaaaacatttttatgcctaagaatcaaggaagtagaagtgaaaaaagatacagaagacattaataaaccaaaaaaatttatgactttcaaagaaaagagaaaatctctatcaagaatgcagagaaagtggaagaaagcagaagagaaactagagcgagagcttcgagaggcagaagcttcagagagtactgagaaaaaacttaaactgcacacagagactctgaatattgtgtttgtaacctacttcagaatattgaagaaggcccagaggtcacctctcctgccagcagttctagaaggtcttgccaagtttgctcaccttataaatgtggaattttttgatgatctgttagtagttcttcatactctcattgagtctggtgacctaagctatcaagaaagtcttcactgtgtccagactgcttttcatattctttctggacaaggtgatgttctgaatattgatccattgaaattctacacacatctctacaaaacactgttcaaattacatgcaggtgctaccaatgaaggtgttgagattgtactccagtgccttgatgtcatgctaactaagcgcagaaagcaagtttctcagcagcgagctcttgccttcatcaaacgcctttgtacccttgctcttcatgttcttccaaattcaagtattggcattttagcaactaccagaatattaatgcatactttccccaaaacagatctactgcttgacagtgaatctcagggaagtggagttttccttcctgaactggatgagcctgagtactgcaatgctcagaacactgctctgtgggaactgcatgctctgcggaggcattatcatcccatagtgcagagatttgcagcccacctgatcgctggagcaccttctgaaggctctggagcactcaaaccagagttgagtcgaagatctgctactgaactttttgaggcatatagcatggcagaaatgacattcaatcctcctgttgaatcttcaaaccccaaaataaagggtaaatttttacaaggggattcatttttgaatgaagatttaaatcagctaatcaaaagatactccagtgaagttgctactgaatcgcctctggatttcacgaaatatttgaaaacatcactacactagtagaggaatgaagtcagtggac

SEQ ID NO: 2274 - protein, 800 aa, Homo sapien
MKARRNKKQIPSFRKLIKTSKVKLENKLKNKQFKQQSTLKKYRKEQRKLRQAVKDAVSKKPIPLENPKEKRPGKRIEREEEEEEEALPLDMMDEDDLQLMKDLGQRVSFLTRDLSSSEPVHAKKRKHERIIDKYEKIPRTLQTAPEKELIHLLPIKDKSGIIPQTREKPVTDSNKDEEDQEEERELEEEIIEDPIQELTIEEHLIERKKKLQEKKMHIAALASAILSDPENNIKKLKELRSMLMEQDPDVAVTVRKLVIVSLMELFKDITPSYKIRPLTEAEKSTKTRKETQKLREFEEGLVSQYKFYLENLEQMVKDWKQRKLKKSNVVSLKAYKGLAEVAVKSLCELLVALPHFNFHNNIIVLIVPLMNDMSKLISEMCCEAVKKLFKQDKLGQASLGVIKVISGFVKGRNYEVRPEMLKTFLCLRIKEVEVKKDTEDINKPKKFMTFKEKRKSLSRMQRKWKKAEEKLERELREAEASESTEKKLKLHTETLNIVFVTYFRILKKAQRSPLLPAVLEGLAKFAHLINVEFFDDLLVVLHTLIESGDLSYQESLHCVQTAFHILSGQGDVLNIDPLKFYTHLYKTLFKLHAGATNEGVEIVLQCLDVMLTKRRKQVSQQRALAFIKRLCTLALHVLPNSSIGILATTRILMHTFPKTDLLLDSESQGSGVFLPELDEPEYCNAQNTALWELHALRRHYHPIVQRFAAHLIAGAPSEGSGALKPELSRRSATELFEAYSMAEMTFNPPVESSNPKIKGKFLQGDSFLNEDLNQLIKRYSSEVATESPLDFTKYLKTSLH

SEQ ID NO: 2275 - DNA, 1668 bp, Homo sapien
atggcagcccgtctgctcctcctgggcatccttctcctgctgctgcccctgcccgtccctgccccgtgccacacagccgcacgctcagagtgcaagcgcagccacaagttcgtgcctggtgcatggctggccggggagggtgtggacgtgaccagcctccgccgctcgggctccttcccagtggacacacaaaggttcctgcggcccgacggcacctgcaccctctgtgaaaatgccctacaggagggcaccctccagcgcctgcctctggcgctcaccaactggcgggcccagggctctggctgccagcgccatgtaaccagggccaaagtcagctccactgaagctgtggcccgggatgcggctcgtagcatccgcaacgactggaaggtcgggctggacgtgactcctaagcccaccagcaatgtgcatgtgtctgtggccggctcacactcacaggcagccaactttgcagcccagaagacccaccaggaccagtacagcttcagcactgacacggtggagtgccgcttctacagtttccatgtggtacacactcccccgctgcaccctgacttcaagagggccctcggggacctgccccaccacttcaacgcctccacccagcccgcctacctcaggcttatctccaactacggcacccacttcatccgggctgtggagctgggtggccgcatatcggccctcactgccctgcgcacctgcgagctggccctggaagggctcacggacaacgaggtggaggactgcctgactgtcgaggcccaggtcaacataggcatccacggcagcatctctgccgaagccaaggcctgtgaggagaagaagaagaagcacaagatgacggcctccttccaccaaacctaccgggagcgccactcggaagtggttggcggccatcacacctccattaacgacctgctgttcgggatccaggccgggcccgagcagtactcagcctgggtaaactccgtgcccggcagccctggcctggtggactacaccctggaacccctgcacgtgctgctggacagccaggacccgcggcgggaggcactgaggagggccctgagtcagtacctgacggacagggctcgctggagggactgcagccggccgtgcccaccagggcggcagaagagcccccgagacccatgccagtgtgtgtgccatggctcagcggtcaccacccaggactgctgccctcggcagaggggcctggcccagctggaggtgaccttcatccaagcatggagcctgtggggggactggttcactgccacggatgcctatgtgaagctcttctttggtggccaggagctgaggacgagcaccgtgtgggacaataacaaccccatctggtcagtgcggctggattttggggatgtgctcctggccacaggggggcccctgaggttgcaggtctgggatcaggactctggcagggacgatgacctccttggcacctgtgatcaggctcccaagtctggttcccatgaggtgagatgcaacctgaatcatggccacctaaaattccgctatcatgccaggtgcttgccccacctgggaggaggcacctgcctggactatgtcccccaaatgcttctgggggagcctccaggaaaccggagtggggccgtgtggtga

SEQ ID NO: 2276 - protein, 555 aa, Homo sapien
MAARLLLLGILLLLLPLPVPAPCHTAARSECKRSHKFVPGAWLAGEGVDVTSLRRSGSFPVDTQRFLRPDGTCTLCENALQEGTLQRLPLALTNWRAQGSGCQRHVTRAKVSSTEAVARDAARSIRNDWKVGLDVTPKPTSNVHVSVAGSHSQAANFAAQKTHQDQYSFSTDTVECRFYSFHVVHTPPLHPDFKRALGDLPHHFNASTQPAYLRLISNYGTHFIRAVELGGRISALTALRTCELALEGLTDNEVEDCLTVEAQVNIGIHGSISAEAKACEEKKKKHKMTASFHQTYRERHSEVVGGHHTSINDLLFGIQAGPEQYSAWVNSVPGSPGLVDYTLEPLHVLLDSQDPRREALRRALSQYLTDRARWRDCSRPCPPGRQKSPRDPCQCVCHGSAVTTQDCCPRQRGLAQLEVTFIQAWSLWGDWFTATDAYVKLFFGGQELRTSTVWDNNNPIWSVRLDFGDVLLATGGPLRLQVWDQDSGRDDDLLGTCDQAPKSGSHEVRCNLNHGHLKFRYHARCLPHLGGGTCLDYVPQMLLGEPPGNRSGAVW

SEQ ID NO: 2277 - DNA, 1642 bp, Homo sapien
ccagatctcagaggagcctggctaagcaaaaccctgcagaacggctgcctaatttacagcaaccatgagtacaaatggtgatgatcatcaggtcaaggatagtctggagcaattgagatgtcactttacatgggagttatccattgatgacgatgaaatgcctgatttagaaaacagagtcttggatcagattgaattcctagacaccaaatacagtgtgggaatacacaacctactagcctatgtgaaacacctgaaaggccagaatgaggaagccctgaagagcttaaaagaagctgaaaacttaatgcaggaagaacatgacaaccaagcaaatgtgaggagtctggtgacctggggcaactttgcctggatgtattaccacatgggcagactggcagaagcccagacttacctggacaaggtggagaacatttgcaagaagctttcaaatcccttccgctatagaatggagtgtccagaaatagactgtgaggaaggatgggccttgctgaagtgtggaggaaagaattatgaacgggccaaggcctgctttgaaaaggtgcttgaagtggaccctgaaaaccctgaatccagcgctgggtatgcgatctctgcctatcgcctggatggctttaaattagccacaaaaaatcacaagccattttctttgcttcccctaaggcaggctgtccgcttaaatccagacaatggatatattaaggttctccttgccctgaagcttcaggatgaaggacaggaagctgaaggagaaaagtacattgaagaagctctagccaacatgtcctcacagacctatgtctttcgatatgcagccaagttttaccgaagaaaaggctctgtggataaagctcttgagttattaaaaaaggccttgcaggaaacacccacttctgtcttactgcatcaccagatagggctttgctacaaggcacaaatgatccaaatcaaggaggctacaaaagggcagcctagagggcagaacagagaaaagctagacaaaatgataagatcagccatatttcattttgaatctgcagtggaaaaaaagcccacatttgaggtggctcatctagacctggcaagaatgtatatagaagcaggcaatcacagaaaagctgaagagaattttcaaaaattgttatgcatgaaaccagtggtagaagaaacaatgcaagacatacatttctactatggtcggtttcaggaatttcaaaagaaatctgacgtcaatgcaattatccattatttaaaagctataaaaatagaacaggcatcattaacaagggataaaagtatcaattctttgaagaaattggttttaaggaaacttcggagaaaggcattagatctggaaagcttgagcctccttgggttcgtctataaattggaaggaaatatgaatgaagccctggagtactatgagcgggccctgagactggctgctgactttgagaactctgtgagacaaggtccttaggcacccagatatcagccactttcacatttcatttcattttatgctaacatttactaatcatcttttctgcttactgttttcagaaacattataattcactgtaatgatgtaattcttgaataataaatctgacaaaatatt

SEQ ID NO: 2278 - protein, 478 aa, Homo sapien
MSTNGDDHQVKDSLEQLRCHFTWELSIDDDEMPDLENRVLDQIEFLDTKYSVGIHNLLAYVKHLKGQNEEALKSLKEAENLMQEEHDNQANVRSLVTWGNFAWMYYHMGRLAEAQTYLDKVENICKKLSNPFRYRMECPEIDCEEGWALLKCGGKNYERAKACFEKVLEVDPENPESSAGYAISAYRLDGFKLATKNHKPFSLLPLRQAVRLNPDNGYIKVLLALKLQDEGQEAEGEKYIEEALANMSSQTYVFRYAAKFYRRKGSVDKALELLKKALQETPTSVLLHHQIGLCYKAQMIQIKEATKGQPRGQNREKLDKMIRSAIFHFESAVEKKPTFEVAHLDLARMYIEAGNHRKAEENFQKLLCMKPVVEETMQDIHFYYGRFQEFQKKSDVNAIIHYLKAIKIEQASLTRDKSINSLKKLVLRKLRRKALDLESLSLLGFVYKLEGNMNEALEYYERALRLAADFENSVRQGP

SEQ ID NO: 2279 - DNA, 634 bp, Homo sapien
cggctgagaggcagcgaactcatctttgccagtacaggagcttgtgccgtggcccacagcccacagcccacagccatgggctgggacctgacggtgaagatgctggcgggcaacgaattccaggtgtccctgagcagctccatgtcggtgtcagagctgaaggcgcagatcacccagaagattggcgtgcacgccttccagcagcgtctggctgtccacccgagcggtgtggcgctgcaggacagggtcccccttgccagccagggcctgggccctggcagcacggtcctgctggtggtggacaaatgcgacgaacctctgagcatcctggtgaggaataacaagggccgcagcagcacctacgaggtccggctgacgcagaccgtggcccacctgaagcagcaagtgagcgggctggagggtgtgcaggacgacctgttctggctgaccttcgaggggaagcccctggaggaccagctcccgctgggggagtacggcctcaagcccctgagcaccgtgttcatgaatctgcgcctgcggggaggcggcacagagcctggcgggcggagctaagggcctccaccagcatccgagcaggatcaagggccggaaataaaggctgttgtaagagaat

SEQ ID NO: 2280 - protein, 165 aa, Homo sapien
MGWDLTVKMLAGNEFQVSLSSSMSVSELKAQITQKIGVHAFQQRLAVHPSGVALQDRVPLASQGLGPGSTVLLVVDKCDEPLSILVRNNKGRSSTYEVRLTQTVAHLKQQVSGLEGVQDDLFWLTFEGKPLEDQLPLGEYGLKPLSTVFMNLRLRGGGTEPGGRS

SEQ ID NO: 2281 - DNA, 773 bp, Homo sapien
atgtcggattcggaggaggagagccaggaccggcaactgaaaatcgtcgtgctgggggacggcacctccgggaagacctccttaactacgtgttttgctcaagaaacttttgggaaacagtacaaacaaactataggactggatttctttttgagaaggataacattgccaggaaacttgaatgttacccttcaaatttgggatataggagggcagacaataggaggcaaaatgttggataaatatatctatggagcacagggagtcctcttggtatatgatattacaaattatcaaagctttgagaatttagaagattggtatactgtggtgaagaaagtgagcgaggagtcagaaactcagccactggttgccttggtaggcaataaaattgatttggagcatatgcgaacaataaaacctgaaaaacacttacggttttgccaggaaaatggttttagtagccactttgtctcagccaagacaggagactctgtcttcctgtgctttcagaaagttgctgctgaaatccttgggatcaaattaaacaaagcagaaatagaacagtcacagcgtattgtcagggcagaaatagtgaagtacccggaagaagaaaatcaacataccacctctactcagagtagaatctgttcagtacagtagtgcagagggtggtgaaggcagatattgtaaactacaaccaggaacctatgtcaaggactgttaaccctcctagaagctctatgtgtgcagttcagtgagcgcatttttcc

SEQ ID NO: 2282 - protein, 220 aa, Homo sapien
MSDSEEESQDRQLKIVVLGDGTSGKTSLTTCFAQETFGKQYKQTIGLDFFLRRITLPGNLNVTLQIWDIGGQTIGGKMLDKYIYGAQGVLLVYDITNYQSFENLEDWYTVVKKVSEESETQPLVALVGNKIDLEHMRTIKPEKHLRFCQENGFSSHFVSAKTGDSVFLCFQKVAAEILGIKLNKAEIEQSQRIVRAEIVKYPEEENQHTTSTQSRICSVQ

SEQ ID NO: 2283 - DNA, 1677 bp, Homo sapien
cgggggttttgatcttcttccccttcttttcttccccttcttctttccttcctccctccctctctcatttcccttctccttctccctcagtctccacattcaacattgacaagtccattcagaaaagcaagctgcttctggttgggcccagacctgccttgaggagcctgtagagttaaaaaatgaaccccacggatatagcagataccaccctcgatgaaagcatatacagcaattactatctgtatgaaagtatccccaagccttgcaccaaagaaggcatcaaggcatttggggagctcttcctgcccccactgtattccttggtttttgtatttggtctgcttggaaattctgtggtggttctggtcctgttcaaatacaagcggctcaggtccatgactgatgtgtacctgctcaaccttgccatctcggatctgctcttcgtgttttccctccctttttggggctactatgcagcagaccagtgggtttttgggctaggtctgtgcaagatgatttcctggatgtacttggtgggcttttacagtggcatattctttgtcatgctcatgagcattgatagatacctggcgatagtgcacgcggtgttttccttgagggcaaggaccttgacttatggggtcatcaccagtttggctacatggtcagtggctgtgttcgcctcccttcctggctttctgttcagcacttgttatactgagcgcaaccatacctactgcaaaaccaagtactctctcaactccacgacgtggaaggttctcagctccctggaaatcaacattctcggattggtgatccccttagggatcatgctgttttgctactccatgatcatcaggaccttgcagcattgtaaaaatgagaagaagaacaaggcggtgaagatgatctttgccgtggtggtcctcttccttgggttctggacaccttacaacatagtgctcttcctagagaccctggtggagctagaagtccttcaggactgcacctttgaaagatacttggactatgccatccaggccacagaaactctggcttttgttcactgctgccttaatcccatcatctacttttttctgggggagaaatttcgcaagtacatcctacagctcttcaaaacctgcaggggcctttttgtgctctgccaatactgtgggctcctccaaatttactctgctgacacccccagctcatcttacacgcagtccaccatggatcatgatcttcatgatgctctgtaggaaaaatgaaatggtgaaatgcagagtcaatgaacttttccacattcagagcttactttaaaattggtatttttaggtaagagatccctgagccagtgtcaggaggaaggcttacacccacagtggaaagacagcttctcatcctgcaggcagctttttctctcccactagacaagtccagcctggcaagggttcacctgggctgaggcatccttcctcacaccaggcttgcctgcaggcatgagtcagtctgatgagaactctgagcagtgcttgaatgaagttgtaggtaatattgcaaggcaaagactattcccttctaacctgaactgatgggtttctccagagggaattgcagagtactggctgatggagtaaatcgctaccttttgctgtggcaaatgggcccccg

SEQ ID NO: 2284 - protein, 360 aa, Homo sapien
MNPTDIADTTLDESIYSNYYLYESIPKPCTKEGIKAFGELFLPPLYSLVFVFGLLGNSVVVLVLFKYKRLRSMTDVYLLNLAISDLLFVFSLPFWGYYAADQWVFGLGLCKMISWMYLVGFYSGIFFVMLMSIDRYLAIVHAVFSLRARTLTYGVITSLATWSVAVFASLPGFLFSTCYTERNHTYCKTKYSLNSTTWKVLSSLEINILGLVIPLGIMLFCYSMIIRTLQHCKNEKKNKAVKMIFAVVVLFLGFWTPYNIVLFLETLVELEVLQDCTFERYLDYAIQATETLAFVHCCLNPIIYFFLGEKFRKYILQLFKTCRGLFVLCQYCGLLQIYSADTPSSSYTQSTMDHDLHDAL

SEQ ID NO: 2285 - DNA, 3328 bp, Homo sapien
aggcgctagaggcgggggcgccgggaggcgcgggctttgctcctggggtctcggccttggccggctggacctgaccctagggcggcttgcgcagctgtcgggacgtgactgcgttcagccgcgtcgggcgtgcttcccagacttgcccaagttcgggtgccctagctgcccctttgcagccgctggcctacccggcccgcgggtgagaaggttgcgacgggaggtgggtggaactcgccagcgccgggaccgcggattggctgcctcggctttctcttttccccgtgggctccggcgtgaggcgctgaagcggccggcagccggcgaccggccctcaccgtccgccgggttgcgctctgcttttgcggtgaggcgttgaccacgcccatatgaattggagctctccgccagtaggagtttccggaaggagtttgaatttttgtgatttttatgcttgtttggtcggtggaatatgttgggatttatgtttgcctctgaacaagtgtcttgctcacatcgtaaatgactttctctccgaaacgctaaatattctttcccgcaggagctcatatccttattttccatgacagatcttaacgacaatatatgcaaaagatatataaagatgataactaatatagttatactgagcctgatcatttgcatttcgttagctttctggattatatcaatgactgcaagcacctattatggtaacttacgacctatttctccgtggcgttggctgttttctgttgttgttcctgttctgatcgtctctaatggccttaaaaagaaaagtctagatcacagtggggctctaggagggctagtcgttggatttatcctaaccattgcaaatttcagcttttttacctctttgctgatgtttttcttgtcttcttcgaaactcactaaatggaagggagaagtgaagaagcgtctagattcagaatataaggaaggtgggcaaaggaattgggttcaggtgttctgtaatggagctgtacccacagaactggccctgctgtacatgatagaaaatggccccggggaaatcccagtcgatttttccaagcagtactccgcttcctggatgtgtttgtctctcttggctgcactggcctgctctgctggagacacatgggcttcagaagttggcccagttctgagtaaaagttctccaagactgataacaacctgggagaaagttccagttggtaccaatggaggagttacagtggtgggccttgtctccagtctccttggtggtacctttgtgggcattgcatacttcctcacacagctgatttttgtgaatgatttagacatttctgccccgcagtggccaattattgcatttggtggtttagctggattactaggatcaattgtggactcatacttaggggctacaatgcagtatactgggttggatgaaagcactggcatggtggtcaacagcccaacaaataaggcaaggcacatagcagggaaacccattcttgataacaacgcagtgaatctgttttcttctgttcttattgccctcttgctcccaactgctgcttggggtttttggcccagggggtgaactttatttcatttccacaggttgaaactggtgagtccagctaaatttgcaattccaactttcatcctaagaataataactgtaatggcaaagcggaaatgccagttcctcctgtattccattgagatgggatttcacattttcctctcatcaactcccctgtaatagctagcgtctttctagtgaaagagaagaattcctagaacttatgcatttttttcctgctgaatggaagtcttgagcaatgaagctatattgtccctacatattactatatattgaactgaaagttcttacataatcaatgtcaagttttgtcttattttgttttgtttgtttaaaccagtgtaggaaataaaagtgatgatatttaaaatagttctcagttgaagcagagaaatgccactgtgctagttgcccaaatgttgtatctattttaaatagtttaagctgatgtgtatgggagcctaaacaagtgtagtatcctgaacttctcccattaattgctattcacaattgggaaaagtgtggagattggttcctagtgagttttgtggcctactccacatttgttcttccttcctcagggttagtgatgaaaaaaagtaaatatctttttcatatgtccattagaatgtatgaaaaaaatcattttaactaaaagcaaaagaattttatcttatatctaaaaaatatataacttactatatgtttcagttgctctctgaacaaaaattatcttcaatttaatatgtggaatgtgttttctagctttctttgaattatgtatggcaacctggtttagcactggcatcctgaacagttaagagtcactgggaaattattgtatttctttataaatttactgtcatatcaattgctggaaaatgctatgatttttctattattaccttctaagttgtattctctcttacactgtagcctcaactaaggcaattctgctatgtttgttcttcactatgatttactgtgtgccaaaggagttttgacagggtacagagtattttactaaaagtatttttaaatgtttctcatgtgatttctgtaccttcttcctcctgccccttttgcttttttaaagaaactggggaaggatttatgaatacaccaccaccagagtggataatgcttagaattctttattggtggccctactatggtgatgatctagaactgacttacttcaggacagaagaaaaaacaatcacacccttaacctttaagccagttagatcagggggttgcaacaattgggttaaactttgggtatacattggaagcaccagggcatgtttgctttttttgtttatgtgtttgttttttgagacagagtctcacactgtggcccaggctggactccagcacagtggcatgatctcagctccgcctcctgggttcacgtgattctcatgcctcagcctcccgggtggctgggatcacaggcgtgcaccatcacgcccggctaatttttgtattttcagtcgagaccggcctggccaacgtggtgaaacaccgtctctactaaaaatacaaaaaattaggtgtggtggtgcgtgcctgtattcccggccactcgggaggctgaggcaggagaatcgctggaacctgggatgtggaggttgcagtgagccaagattgcaccactgtactccagcctgggcaacagagggagactccatctagactccatctcaaaaaaaaaaaaaaaaaaaa

SEQ ID NO: 2286 - protein, 336 aa, Homo sapien
MTDLNDNICKRYIKMITNIVILSLIICISLAFWIISMTASTYYGNLRPISPWRWLFSVVVPVLIVSNGLKKKSLDHSGALGGLVVGFILTIANFSFFTSLLMFFLSSSKLTKWKGEVKKRLDSEYKEGGQRNWVQVFCNGAVPTELALLYMIENGPGEIPVDFSKQYSASWMCLSLLAALACSAGDTWASEVGPVLSKSSPRLITTWEKVPVGTNGGVTVVGLVSSLLGGTFVGIAYFLTQLIFVNDLDISAPQWPIIAFGGLAGLLGSIVDSYLGATMQYTGLDESTGMVVNSPTNKARHIAGKPILDNNAVNLFSSVLIALLLPTAAWGFWPRG

SEQ ID NO: 2287 - DNA, 1853 bp, Homo sapien
cacagggactgcgctcccttgcccctagcgctcccgcgctgctgctccagccgcccggcagctctgaggatggagaggagggcgcggagctcctccagggagtcccgcgggcgaggcggcaggactccgcacaaggagaacaagagggcaaaggccgagaggagcggcgggggccgcgggcgccaggaggctgggcccgagccgtcgggctccggacgggcggggaccccgggggagccccgagcgcccgccgccacggtggtggacgtggatgaggtccgaggctccggcgaggagggcaccgaggtggtggcgctgttggagagcgagcggcccgaggaaggtaccaaatcctccggcttaggggcctgtgagtggcttcttgtcctcatttccctgctcttcatcatcatgaccttccctttttccatctggttctgcgtaaaggttgtacaagagtatgaaagagtaattatattccgactgggacatctgcttcctggaagagccaaaggccctggtcttttcttttttttgccctgcctggatacctaccacaaggttgaccttcgtctccaaactctggagataccttttcatgagatcgtgaccaaagacatgtttataatggagatagatgccatttgctactaccgaatggaaaatgcctctcttctcctaagcagtcttgctcatgtatctaaagctgtgcaattccttgtgcaaaccactatgaagcgtctcctagcacatcgatccctcactgaaattcttctagagaggaagagcatcgcccaagatgcaaaggttgccttggattcagtgacctgtatttggggaatcaaagtggagagaatagaaattaaagatgtgaggttgccagctgggcttcagcactcactggctgtggaggctgaagcgcaaagacaagccaaagtgcggatgattgctgcagaagcggaaaaggctgcttctgagtccctgaggatggcagctgagattctgtcaggcacccctgctgctgttcagcttcgatacctccacacccttcagtctctgtccacagagaagccttccactgtggttttacctttgccatttgacctactgaattgcctgtcttctcccagcaacagaactcagggaagcctccccttcccaagtccttccaaacctgttgagccactaaatcctaaaaagaaagactctcccatgttataggaaggatggggcataatgtgactgtaaaggggcctgccatagaaaagtcacatccctgagggagacactctgtcctcattccctgcccttcctttggttgccatatggaatggccatggaatgcacgaagtcacaatgcaccatccatgagaagacagtgaaatgatgtaatgacagagaaggcagacaacatgtttccgtgactcatctagtcagagcaattatgggaaacagctttggtcaacattctactttggaaagaattttgagtctagatgtggttaaattttgacttctgggaacttggttcagatgtccctttcactgtatgtcctctgacccctttggcaaggttgccacagctcccacagcccttcctacaagcacctatcattgggcttgtcacactctattgctcttctgtcccgaagatgcagtcttctctccaatgatactaccaagtcttagttttcctcaaccacactcaatctttttgctccaccctgaattcctcacacctaaccctgatagttacctaaagtgacacttaaatgtttcagagtgaatgcaaaaaagagagatgtacttggagtcggatatacaatttatccctaattaaagcatttaaaagg

SEQ ID NO: 2288 - protein, 383 aa, Homo sapien
MERRARSSSRESRGRGGRTPHKENKRAKAERSGGGRGRQEAGPEPSGSGRAGTPGEPRAPAATVVDVDEVRGSGEEGTEVVALLESERPEEGTKSSGLGACEWLLVLISLLFIIMTFPFSIWFCVKVVQEYERVIIFRLGHLLPGRAKGPGLFFFLPCLDTYHKVDLRLQTLEIPFHEIVTKDMFIMEIDAICYYRMENASLLLSSLAHVSKAVQFLVQTTMKRLLAHRSLTEILLERKSIAQDAKVALDSVTCIWGIKVERIEIKDVRLPAGLQHSLAVEAEAQRQAKVRMIAAEAEKAASESLRMAAEILSGTPAAVQLRYLHTLQSLSTEKPSTVVLPLPFDLLNCLSSPSNRTQGSLPFPSPSKPVEPLNPKKKDSPML

SEQ ID NO: 2289 - DNA, 1538 bp, Homo sapien
atggatgggggaaccgggcggcgagacggcggcaggacggcggcaggatgtgtgaccggaatggtggtcggcggcttcgacagtggctgatcgagcagattgacagtagcatgtatccaggactgatttgggagaatgaggagaagagcatgttccggatcccttggaaacacgctggcaagcaagattataatcaggaagtggatgcctccatttttaaggcctgggcagtttttaaagggaagtttaaagaaggggacaaagctgaaccagccacttggaagacgaggttacgctgtgctttgaataagagcccagattttgaggaagtgacggaccggtcccaactggacatttccgagccatacaaagtttaccgaattgttcctgaggaagagcaaaaatgcaaactaggcgtggcaactgctggctgcgtgaatgaagttacagagatggagtgcggtcgctctgaaatcgacgagctgatcaaggagccttctgtggacgattacatggggatgatcaaaaggagcccttccccgccggaggcctgtcggagtcagctccttccagactggtgggcgcagcagcccagcacaggcgtgccgctggtgacggggtacaccacctacgacgcgcaccattcagcattctcccagatggtgatcagcttctactatgggggcaagctggtgggccaggccaccaccacctgccccgagggctgccgcctgtccctgagccagcctgggctgcccggcaccaagctgtatgggcccgagggcctggagctggtgcgcttcccgccggccgacgccatccccagcgagcgacagaggcaggtgacgcggaagctgttcgggcacctggagcgcggggtgctgctgcacagcagccggcagggcgtgttcgtcaagcggctgtgccagggccgcgtgttctgcagcggcaacgccgtggtgtgcaaaggcaggcccaacaagctggagcgtgatgaggtggtccaggtcttcgacaccagccagttcttccgagagctgcagcagttctataacagccagggccggcttcctgacggcagggtggtgctgtgctttggggaagagtttccggatatggcccccttgcgctccaaactcattctcgtgcagattgagcagctgtatgtccggcaactggcagaagaggctgggaagagctgtggagccggctctgtgatgcaggcccccgaggagccgccgccagaccaggtcttccggatgtttccagatatttgtgcctcacaccagagatcatttttcagagaaaaccaacagatcaccgtctaagtgcgtcgcttgggcgccccaccccgtctgcgtcctgcatccatctccctgttacagtggcccgcatcatgattaaagaatgtggatccctctgtctggggtgggatgccttactttgcacttaatttaataagggcattctcggaggagtagacgtttaatacgaagtggcgcatagccctgccgagatgtcggtgatggcctgatgcg

SEQ ID NO: 2290 - protein, 426 aa, Homo sapien
MCDRNGGRRLRQWLIEQIDSSMYPGLIWENEEKSMFRIPWKHAGKQDYNQEVDASIFKAWAVFKGKFKEGDKAEPATWKTRLRCALNKSPDFEEVTDRSQLDISEPYKVYRIVPEEEQKCKLGVATAGCVNEVTEMECGRSEIDELIKEPSVDDYMGMIKRSPSPPEACRSQLLPDWWAQQPSTGVPLVTGYTTYDAHHSAFSQMVISFYYGGKLVGQATTTCPEGCRLSLSQPGLPGTKLYGPEGLELVRFPPADAIPSERQRQVTRKLFGHLERGVLLHSSRQGVFVKRLCQGRVFCSGNAVVCKGRPNKLERDEVVQVFDTSQFFRELQQFYNSQGRLPDGRVVLCFGEEFPDMAPLRSKLILVQIEQLYVRQLAEEAGKSCGAGSVMQAPEEPPPDQVFRMFPDICASHQRSFFRENQQITV

SEQ ID NO: 2291 - DNA, 859 bp, Homo sapien
ggtgtacagcaagctgtgattcttgggaaaactaaaaaagttttctgggacaacggggccccagagtgatggcagacaatgtcagccactaacaacatagcccaggcccggaagctggtggaacagctacgcatagaagccgggattgagcgcatcaaggtctccaaagcggcgtctgacctcatgagctactgtgagcaacatgctcggaacgaccccctgctggtcggagtccctgcctcggagaacccctttaaggacaagaaaccttgtattattttataactgtgttctcatatgttctctctctctctctttctttctctctctctctctgtctctgtctctgtctcaggcagggcatcattcagtaattagctcaaacaaaacatctcaagtccccaaaacctttaattccaaaagaaatcccccctctaccccgccaaaaaaggcgttcccaccgcccggatggggtagaatggaccttgtaggtggagatgaattttcaggtccgaccccatggccttctcagtttgggccaaaagggatggaggctttacggccacttcccgttcggaataactgaaatccccagcgatggggtaacaattttttaaaactctcgattgccgtttcaattgtggaccggcgccgagggggaaagggaggtgacttcgcccggtggcaatagttccgggagaattggccattggtaaaaagacttcatagggtcactggaatgctttgtgttgtttttaagtagaggtaaaattgagatggggggcgggaggtgacatcatgaagttttttggaaatatctctttatttaaaaaattgttactccatacggctaaaaaag

SEQ ID NO: 2292 - protein, 68 aa, Homo sapien
MSATNNIAQARKLVEQLRIEAGIERIKVSKAASDLMSYCEQHARNDPLLVGVPASENPFKDKKPCIIL

SEQ ID NO: 2293 - DNA, 2058 bp, Homo sapien
cggtgctagcgacacgggagtggcaaacgcatcctcttgccgttcccggtgtttgggccttgcctgtgacggtgggaaaagaaaatggccttgctgtgctacaaccggggctgcggtcagcgcttcgatcctgagaccaattccgacgatgcttgcacataccacccaggtgttccggtctttcacgatgcattaaagggttggtcttgctgtaagagaagaacaactgatttttctgatttcttaagcattgtaggctgtacaaaaggtagacataatagtgagaagccacctgagccagtcaaacctgaagtcaagactactgagaagaaggagctatgtgaattaaaacccaaatttcaggaacacatcattcaagcccctaagccagtagaagcaataaaaagaccaagcccagatgaaccaatgacaaatttggaattaaaaatatctgcctccctaaaacaagcacttgataaacttaaactgtcatcagggaatgaagaaaataagaaagaagaagacaatgatgaaattaagattgggacctcatgtaagaatggagggtgttcaaagacataccagggtctagagagtctagaagaagtctgtgtatatcattctggagtacctattttccatgaggggatgaaatactggagctgttgtagaagaaaaacttctgattttaatacattcttagcccaagagggctgtacaaaagggaaacacatgtggactaaaaaagatgctgggaaaaaagttgttccatgtagacatgacttgcatcagactggaggtgaagttaccatttcagtatatgctaaaaactcacttccagaacttagccgagtagaagcaaatagcacattgttaaatgtcattattgtatttgaaggagagaaggaatttgatcaaaatgtgaaattatggggtgtgattgatgtaaagcgaagttatgtaactatgactgcaacaaagattgaaatcactatgagaaaagctgaaccgatgcagtgggcaagccttgaactgcctgcagctaaaaagcaggaaaaacaaaaagatgacacaacagattgagtgggagatggaaggaaggctattacattatttccgaatttttaatactgtgtgaagtggtggcttgctgctgtaatcttttgttttgttgttgtgttactgaatgtggcatttcagggttaacattaggttcttaaaagccaaagtcagtttgtctttttgtgcctctcatctttcttttgtgttatgtaagattgattattcatttctccctactggtaggaaccatagttgtgtcctatacttgaagaggctggaaagtagcccataaccataattgcagtatttctttgtatttctctgttaagcaaagaaatattaaggaacattttttttatgtttttgtattattccataattagtaaagcaagatgaaatgtcaaattttaatcagttttttcatggatttgtgttcttacagtacttgaaaatatttaaggaagagatgaagctctgcagttttttctatgtgggatgattacttttttaaggaggattaattctgaggtagtatagtaactaaaggggaatatatgaattgtttaacaaattagaatttgtttacaactacttgaatttttaaattatgtcaaaacttacattacttgccaagcagtatgatgttataggaaacataaataagattacagaggtatcaatttggttaaaattcaccattttataagactaagcaataatcttaacaacctctttcctgaatatttaaatgtgtttgtatggtgttatgactaattgttactgatttagagactaagccctcttaaaacctttagttaaatataaaaagaaattatatatatcttgcctccctgatggaaaactatataaaattgtagacttaaaaggtttgtggaaatacattaggatatcagaaaactaaatatatggagttgctttatgactattacatgttaaataaaaatagcttaattgttaaaaaaaaaaaaaaaaaaa

SEQ ID NO: 2294 - protein, 332 aa, Homo sapien
MALLCYNRGCGQRFDPETNSDDACTYHPGVPVFHDALKGWSCCKRRTTDFSDFLSIVGCTKGRHNSEKPPEPVKPEVKTTEKKELCELKPKFQEHIIQAPKPVEAIKRPSPDEPMTNLELKISASLKQALDKLKLSSGNEENKKEEDNDEIKIGTSCKNGGCSKTYQGLESLEEVCVYHSGVPIFHEGMKYWSCCRRKTSDFNTFLAQEGCTKGKHMWTKKDAGKKVVPCRHDLHQTGGEVTISVYAKNSLPELSRVEANSTLLNVIIVFEGEKEFDQNVKLWGVIDVKRSYVTMTATKIEITMRKAEPMQWASLELPAAKKQEKQKDDTTD

SEQ ID NO: 2295 - DNA, 4152 bp, Homo sapien
cccaggccggctctggcctcctgacccagacagcgcagggcgcgagggatcgcgcggccgagcccgggtcgcgccgctcccagcatcggggccgctagccaagagttcgaggccttcccgatccggatgtgatgaaaaagagcaacagagggagaagtgtttcaggattgtaggagtggaagaggggaaagagaggcagagagggggaaggccccctcgcaggggagccggctggagtgagctggctggaaagagggggcggagtgcgcggagtcagagccgccaccgctgccgcagttgccgccactgcggcgtctgggctgagccggagggaggcgggaggacgcgcaggggcggccgccgccgtcgtcaggccaccggggcgaaaatgcggccgctgccggaggctcgctaactttccggggcggaagaggaggaggaggaggaggaaggggcttggagcgactacggggggatgcggagaagcagtcagttccctgcacccagcacctcacagcccttcctccgtgcgccctgccgggcggcgagctaggcggcagcggcgcggcgcgggctcggcggagcggcccatgtccggcgcgggcgaagccctcgctcccgggcccgtggggccgcagcgcgtggccgaggcgggcggcggccagctgggctccacagcccagggaaaatgtgataaagacaatactgagaaagatataactcaagctaccaatagccacttcacacatggagagatgcaagaccagtccatttggggaaatccttcggatggtgaactcattagaacccaacctcagcgcttgcctcagcttcagacttcagcacaggtgccaagtggtgaggaaataggcaagataaagaacggccacacaggtctgagcaatggaaatggaattcaccacggggccaaacacggatccgcagataatcgcaaactttcagcacctgtttctcaaaaaatgcatagaaaaattcagtccagcttgtctgtaaacagcgatatcagtaagaagagcaaagtaaatgctgtcttttcccaaaagacaggctcttcacctgaagattgttgtgtccactgtatcctggcttgcttgttctgcgaattcctgaccctttgcaacattgtcctgggacaagcgtcatgtggcatctgcacctcagaagcctgctgctgttgctgtggtgacgagatgggggatgattgtaactgcccttgtgatatggactgtggcatcatggatgcctgttgtgaatcatcagactgcttggaaatctgtatggaatgctgtggaatttgttttccttcataaatatttatcttttgtttgtgttaaaactggagagtgtttaaaaatttccttttggggggaagaaaagcacattgtaagattctcatgaaacaacatggaatttgcactgttaactcattattgtaagtaatctctgaaagcctttttactttaaccaaatctacatggtttaatatgtgaaattttaactactttaactagttttataaatttcttaatatgttacaataacttagggacattttgacaccccccttcccaaatgttaaatgccttctcctttttaccgatatttctgtttcttttaaccgttctcaggagcactttgctccaaatatattatttttcagtgtgtatttaaacgaggcagtttattttgatatgtatctattcatgattgaaaggaagcagtcttggccaggcacggtggcttacacctgtaaccctggcattttgggaggccaaggtgggcagattgcctgagctcaggagttcgagaccagccagggcaacatggtgaaaccccatctctactaaaatacaaaaagttagctgggcttggcggtgtgcgcctgtagtcccagctactcaggaggctgaggcaggagaattgcttgaacccgagaggcggaagttgcagtgagccgagattgtgccactgaactccaacctgcactccagcctgggcaacagagcgagactccatctctaaataaataaataaataaataaataaataaataaataaataaataaacaaaccagtctttattttaaaagaaactttaggaaacaaacccacataatagttgggaaccagtgttgatctctctcccttaccttctccacttgttcaacagactctgaatgccgactgtgtggactctcttcctcagactgtggggacagatacaattccactcctgtccacaggaacatgagatttagcagactaaggagatctgtaaagaatgaaccataccacaaggcatactgaagtgaggattataagagaaataaactcaaaatgctgttggaatatgcagagaattgctaccagaatattcagtaaggtttcagggagaatgtggcatttgaggactctcttagaatgagtgattcacctgctatttaaatgaattatttagatttttgacaaagatttaggtggacaccctaaactgtgtgtgcctttaaccagttaaaagaacagtgccttcagcatacttttttattagttgtaggaatacagctttttgaaaaagctataaagtttaaattaactaaaaatatgcattttcttacacataatttaaatgttatcatacttttttgatgaaaacataatgccttagtaaaatagctctatttaataaagaagattgagtactctgacacatttcatttaaattaggaaatttttaatattaaaatcccagtgttctgagttattgaaaggctttcttttattttgagagctttaggtctttttgggatgagaacattttagttgtttagtttgtttcttaagcagtgctattttttgtaaacacagataaatggaaaccattcttttcaatgcagaagaaatctagatatcccctactgtgaccaaatttctgtattacgattttatgttaaattaaactaatatggcaggttataatgatccttaagtgtaaagaaatcagtcaattacaagagtaattgtatagttattgagacctatagtgtgtggcttagatgaaagggagagtaaattttcataccatgctctctcctactcagtttgatctctctaaaattgtagtttggtttgatttaatataattcttagtagaaattttgaaagtatgctttgggattaataattatttttaatttttctggctgaatatcaaattgatagtaacaacagaagcataattttaggaaggctttcgcaaacctagccttttaagagaggtttttaacctgaagcatgagaatatatcacctgtggtttttcctttgagatgaaacgtagtttctagttatatcattacttaaagggcttaaaaagaaaaaacttagcaaacttttgaatctttcttttattgctatttacacatacatacacacatacaaaacctttaaattttgggatctgaatataattctggtaaacagctgtcttcatttttctcctctaaagaacttaattcatttgttacataaaatataaggaaatctttatactattttacagtaaccacaatctaaatatttacatatacccaaaattaacttatgctcatatattaggatgtgagaatatcatctgtttatggacacatgaaacctcctaatgacctggaattgttagaatatttgactttttatatgcaaagtttttcaaccaagtggtttgtctaatatttaaacatgtactggcacaatttgtgatgaaaatattagcacatttgcaataatgtttctccataacagagaatgttaatggataccagaattttatttttgtatttatgttcatagtacttttcctcttgtctactccagacagttattccataaagcatttgtataattaaaaggaaaacagaaaaaggaaaagtaggcaaatgtgaaaatagtttcaatatatcttatgatttcttaatgtaaaatgttttgttgaagtatatggctatcatgactaagtgctagaatttatagttacaggcggtgtccttttaaatgtggaaaggcttttaaaatattttaaaactggacctgtattatcctgaatacactattttgaaaatttttaagaaaaaaaaaa

SEQ ID NO: 2296 - protein, 355 aa, Homo sapien
VRGVRAATAAAVAATAASGLSRREAGGRAGAAAAVVRPPGRKCGRCRRLANFPGRKRRRRRRKGLGATTGGCGEAVSSLHPAPHSPSSVRPAGRRARRQRRGAGSAERPMSGAGEALAPGPVGPQRVAEAGGGQLGSTAQGKCDKDNTEKDITQATNSHFTHGEMQDQSIWGNPSDGELIRTQPQRLPQLQTSAQVPSGEEIGKIKNGHTGLSNGNGIHHGAKHGSADNRKLSAPVSQKMHRKIQSSLSVNSDISKKSKVNAVFSQKTGSSPEDCCVHCILACLFCEFLTLCNIVLGQASCGICTSEACCCCCGDEMGDDCNCPCDMDCGIMDACCESSDCLEICMECCGICFPS

SEQ ID NO: 2297 - DNA, 5350 bp, Homo sapien
actgccgtgccggacccccgagccggagccgagcgcgccgaggccggggccatggagaaagcgcggccgctgtgggccaactcgctacagttcgtgttcgcctgcatctcgtacgccgtgggcctgggcaacgtgtggcgattcccgtacctgtgccagatgtacggcggaggtagtttcctggtcccctacatcatcatgcttatcgtggagggaatgccgctcttgtacctggaactggctgtggggcagcgcatgcggcagggcagcatcggcgcctggaggaccatcagcccgtacctcagtggtgtcggggtcgccagcgtggtggtctctttcttcctctccatgtactacaacgtcatcaacgcctgggccttctggtacctcttccactccttccaggatcccctgccgtggtctgtctgcccactgaatggtaaccacacgggctacgatgaggagtgcgagaaggcgtcctccacacagtacttctggtacaggaaaaccctcaatatctcgccgtccctccaggagaacgggggtgtgcagtgggagccggcgctgtgcctcctcctggcctggctggtggtgtacctgtgcatcctgcgtggcaccgagtccactggcaaggtggtgtatttcacggcgtcactgccctattgcgtgctcatcatctacctcatcaggggcctcacgctccacggagccaccaatggcctcatgtacatgttcactcccaagatagagcagctggccaaccccaaggcctggatcaatgcagccacccagatcttcttctcacttggcctgggcttcggcagcctgatcgccttcgccagctacaatgagccatccaacaactgccagaagcacgccatcatcgtgtccctcatcaacagcttcacctccatatttgccagcattgtcaccttctccatctatggcttcaaggccaccttcaattatgaaaactgcttgaagaaggtgagtctgctgctgaccaacacttttgaccttgaagatggctttttgacagccagcaacctggagcaggtgaagggctacctcgcatctgcctacccaagcaaatacagcgagatgttcccgcaaatcaaaaactgcagcttggaatcggagctagacacggccgtccagggcactggcctggcattcatcgtctacacagaggccattaaaaacatggaggtgtcccagctgtggtcggtgctctacttcttcatgctgctgatgctgggcattgggagcatgctggggaacacagcggccatcctcacccctctgacagacagcaagatcatctccagccacctgcccaaggaggccatctcaggtctggtgtgccttgtcaactgtgccattggcatggtgttcacgatggaggctgggaactactggtttgacatattcaacgactacgcggccacactgtccctgctgctcatcgtgctggtggagacgattgccgtgtgctacgtgtacgggctgaggagatttgaaagtgaccttaaggccatgaccggccgagctgtgagctggtactggaaggtgatgtgggctggcgtaagcccactgctgattgtcagcctctttgtcttctacctgagcgactacatcctcacggggaccctgaagtatcaagcctgggacgcctcccagggccagctcgtgaccaaagattacccggcctatgcactggctgtcatcgggctgcttgtggcctcctccaccatgtgcatccccctggcggccctggggacttttgttcagcgtcgcctcaagaggggagacgcagaccccgtggcctgagatgtgggcttcccagccgctcacggttttacagatactatttacaggcggaaactcctcggctgctttttcaaatgcttaagccaggagtgctcagcccatcaacttcctgagtgtctaaagaagatgaggaaggtgtgcaggaagaaaactcccttgggagaacgcacaccctcccgtggtggctgttcctccctgtcacctgcctcctcatcatggaagggggtgggctatgaaagccggtctcaaagataactgcatccttcattccaggaaagccctagaattagggcacattgcaaactgaaatatgactataattcttatgggaccaaatttaagcaatttttgtttttggctgaagagacaccaaaatattagaggacaaatatttttagatccatttaaggagttttgaagtgcctaagatgacctatttgtcagtggtgcaaaattaattctcttcttttttgagttgtagtgaatatgcaatttctgtgttccccttccaccctttaaatcttaggatgacaagttataaagaaagaagatctttgtctgggacccccaaagggatcctttctctaaggtctctgacagtgggtccaggaccagacctctctacaaaaaattgccccaactacagtttgcaaccccaaaccacattagaagtctgtgcagacatccctccgtggtgtgtgtcttggtgcattggaaaaggagtcaggagccactgtgaggtgagaatgaaagtggatctcagctgggcacggtggctcacgcctgtaatcctagcaccttgggggtcaaggtgggtggatcacttgaggtcaggagtttgaggccagcctggccaacatggcgaaaccccatttctactaaaaatacaaaaaaattagctgggagtggtggcataggcctgtaattccagctactctggctgctgaggcacaagaatcatttgaacctaggaggtggcggttgctgtgagccaagatcatgccactccactccagtctgggcgacagagcaagactctgactcaaaaaaaaaaaaaagtggctctgactttcccataggcttaatattacatttggacatcgtggccaactctatcaagaccacaaataccacttacaattaattttaaattattcatctgtacatagttttctaaaatgtatataattcaaacagagcatcttgtaactgaagacacaccatatctatgatatcgcattagtccatgtggggaaaagaaagatcagattgttactgtgtctgtgtagaaaaggaagacataagaaactccattttgatctgtactaagaaaaattgtttctgctttgagatgttgttagcctataactttagccccaactctgtgctcacagaaacatgcgctgtaatgaatcaaagtttaatggatttagggctgtgcaggatgtgccttgttaacaatatgtttgcaggctgtatgcttggtagaagtcatcgccattctccattctcgattaaccagggacacaatgcacagcagaaagctgcagggacctctgcccaagaaagcctgggtattgtccaaggtttcccccccactgagacagcctgagatatggcctcatgggaagggaaagacctgactgtcccccagcccgacacctgtaaagggtcggtgctgaggaggaatagtgaaggagggaggcctctttgcagttgagataagaggaaggcttctgtctcctgcttgtccctggtaatggaatgtctcggtgtaaagctgaccattcccattcgttctattctgagataggagaaaaccgccctgtggctggaggtgagatatgctggcagcaatactgctctgttactccttgctacactgagatgtttgggtaaagagaaacataaatctagcctacgtgcacatctgggcacagtacctttccttgaacttattcgtgatacagattcctttgctcacatgtttccctgctgaccttcttcccacctgttgccctgctacactcccctcgctaagacagtaaaaataatgatcaataaatactgagggaactcagaggccagcgccggtgcgggtcctccacatgctgagcgccggtcctgggcccactgttctttctctatactttgtctctgtgtcttatttcttttctcaaaaaaatttttctttttttaactgcaataaagtaggtcgttacccctaaagtgagcgagtcccttcctgctctaacgtccagtgcttccttgagatcatggaattctggagagtttctgtggatatatttgcacagatatctttgaagacacaaacactcacctgggacgttggccggagatgtctttttatttttgtgctgtaaaattctcttacagcaaaaataggctttagaaaggtcttctactgtcttcagcaaccatctcatcttccagcttcacctgattgtccagttatcatacatttgactttcaaatgtatgaaccagcatgtaccccatggatttaatcttatctaccccgtggattcaatcttcttatcagaaggttcttttatgtcaaaaaacctgctgtcaaggcttgaagagccggcacactcaatggcaaacacagcaccgagtctgctctgaatcctggaggatctggccctcctctcaacccccactcacagtcaccgtcttacaactcagggccacctgggatcagtcatcagtcagggtgcgtaagccttgaataccaggtagccgcaggagtgaaaagataaatgtcctagatcattaccttattcagtgtccccaccttgcagcgcattccaaccacctgggagcatttaaaactccagatgcccacaccacaccctggggccacccatcagaccttctggaagcaagacctgggcctccatggccccaaaaactccctaggtgatccgatgtgcagccaaatttgagaggccccatttaaaaaagaaagaacatgggtggtacattgaggagtatttacattttataaaatgacttaaaaatttgaaggcatttttgagcatttccaattatatggaagagttacttctacggaatagtttttgctcatggaactcaaacagatgaagcaccactgttacagaataatgtgctccagatgaaaatgtctcgtttctgtgaatttcatgaagagcagaacatttctcaagaatcctcttgagccagtaatcaatcctgtctcaaaaaatgttctttgccatttcctagatactgcacaaaagtggccatgtcgacatttgtccacccaccctccaataagctggagcgacaaagggacattccatccctgtacccttagtggtagccatgacacgatggccagatcatggactccggaaagctttctgtttttactggaaacatagcaaaccttgatttagctccaagaaattgagtagggaaatatttgttttttagcaattgtcatagtaaataaaactctaagcaaatgtgtgtac

SEQ ID NO: 2298 - protein, 592 aa, Homo sapien
MEKARPLWANSLQFVFACISYAVGLGNVWRFPYLCQMYGGGSFLVPYIIMLIVEGMPLLYLELAVGQRMRQGSIGAWRTISPYLSGVGVASVVVSFFLSMYYNVINAWAFWYLFHSFQDPLPWSVCPLNGNHTGYDEECEKASSTQYFWYRKTLNISPSLQENGGVQWEPALCLLLAWLVVYLCILRGTESTGKVVYFTASLPYCVLIIYLIRGLTLHGATNGLMYMFTPKIEQLANPKAWINAATQIFFSLGLGFGSLIAFASYNEPSNNCQKHAIIVSLINSFTSIFASIVTFSIYGFKATFNYENCLKKVSLLLTNTFDLEDGFLTASNLEQVKGYLASAYPSKYSEMFPQIKNCSLESELDTAVQGTGLAFIVYTEAIKNMEVSQLWSVLYFFMLLMLGIGSMLGNTAAILTPLTDSKIISSHLPKEAISGLVCLVNCAIGMVFTMEAGNYWFDIFNDYAATLSLLLIVLVETIAVCYVYGLRRFESDLKAMTGRAVSWYWKVMWAGVSPLLIVSLFVFYLSDYILTGTLKYQAWDASQGQLVTKDYPAYALAVIGLLVASSTMCIPLAALGTFVQRRLKRGDADPVA

SEQ ID NO: 2299 - DNA, 1397 bp, Homo sapien
gagagatgctgccgctgctgctgccgctgcccctgctgtgggcagggccctcgctcaggatgcaagattccggctggagatgccagagtccgtgacggtgcaggagggtctgtgcatctttgtgcactgttcggtcttctacctcgagtatggctggaaagattctacccctgcttatggccactggttccgggaaagggtcagtgtagaccaggagactccatggccacaaacaactcaactcaaaaagtgcagaaggagacccagggccgattccacctcctcggtgatccctcaaggaacaactgctccctgagcatcagagacgccaggaggagggacaacggttcatacttcttttgggtggcgagaagaagaacaaaatttagttacaaatattccccgctctctgtgtatgtgacagccctgacccacaggcccgacatcctcatcccggagttcctaaagtctggccatcccagcaacctgacctgctctgtgccctgggtctgtgagcagggaacaccccccatcttctcctggatgtcagctgcccccacctccctgggccccaggaccctccactcctcagagctcacgatcatcccacggcctcaggaccacggcaccaacctcatctgtcaggtgacgttccccggagctggtgtgaccacggagagaaccatccagctcagtgtctcctggaaatcaggaaccgtggaggaggtggttgttttggccgtgggggtagtggctgtgaagatcctgcttctctgcctttgcctcatcatcctcagtttccacaagaagaaggcggtgagggcagtggaggttgaggagaatgtatatgctgtcatgggttaatctctcaggcctccagactgtacttccagatgtctcctcatccagttcctccacagtctgaatggccatgtttcttcttcattgctggagaatgaagtgcaaatgccactgcctggactgaaggcctttcacgatctgtcttctgctggactctgctcctgatcccccttctccttgcatcacccgaagtctccctacacccaccaggccaagccctctgtgattctgagactttgcatgtgtagttacttctcctgaaatggccttcctccccattcctgccaatccaggtccttatcatccttcaggttgtcttaaatgtcatccaggtgtgtgtatttttatgtaatccttgtatgatattaagcggagatgtggcatttgttcattaatttgtagacatattcagtaaccatactgaatacatataatgactatgtgccagcatttccgtatgtgcaagaagttcatcaatagatatagactcaaagagctctgtcatcaagctgttgttctgaagagcagaaggatac

SEQ ID NO: 2300 - DNA, 1787 bp, Homo sapien
caagcttatgcatgcggccgctgaatggaggccaacatgccgaagcggaaggagcccggcaggtctctccgcatcaaagtcatctccatgggcaacgccgaagtggggaaaagctgtattataaagcgatactgtgagaaaagattcgtgtctaaatacctggcaacaattggaattgactatggagtcacaaaggtacacgtcagagacagagaaatcaaagttaacatctttgatatggctggacatcccttcttctatgaggttcgaaatgagttttacaaggacacacagggtgtgatactggtctatgatgttgggcagaaagactcctttgacgcccttgatgcgtggctggcagaaatgaagcaagagcttggacctcatggaaacatggaaaatattatatttgtagtttgtgccaacaagattgattgtaccaaacatcgctgtgtagatgaaagtgaaggacgtctttgggctgaaagcaaagggttcctgtactttgaaacttcagcacaaactggagaaggcattaatgagatgttccagaccttttatatatccatagttgatttatgtgaaaatggcgggaaacgccctaccaccaatagcagtgctagtttcaccaaagaacaagcagatgccattcgcagaattcgaaatagtaaagacagttgggacatgctgggagtcaaacctggggcctcaagggatgaagtcaataaagcgtatcggaaacttgctgtgcttcttcaccctgacaaatgtgtagcacctggcagtgaagatgccttcaaagcagttgtgaatgctcggacagccctcctgaaaaacatcaagtagaaagtacagaaaaaagccacatgtgggactcaaatgcaaacagactttccctagaggtgaaataaccaacgtggagttttccttcccagaatctcactgctcttttcattcatgtgttgtcatttgtatatcagtaattcaggtacccatttcatagacattttactgagaaatgacctgcatttgtatgaagtgaactgagcgtcacaccctgtacttcatttcatatttctagataattctgaatttttttctcattcgtcagctctgtaattatagtatcacttagacatttcacttggggaaatccacaaggttcctggagggagggaagagaggacaagaggaccctttcactttttcttttttacggaattcatcatcagagaagaaaataacaaaaatggaagcaaacaacatcagaacccctgtaagtttggtgtgaccttacagacaagttgctgcttttacaatgagttccttaggtggtattttaacccatcgatctataatgatgactcttggcagccctttgggagtttgtaaaatgaggtgatacagttctgaattgagcattcctttatgatattcactctgttcctcttctgcagccaccagtgggagagacaagccagtcctaagagaaaaggtggtggcagccacaaattctaggtacactggctgctgcctatcctgtccctggatctgaggcctttcccttgccatagaaatggttgctggtagcagtagagagcactgtgcacctgggaatgaggaatcaggccccaagacagaagtacttggaggagccagctgcagtagtatccgcctgtagtcccagctactcaggaggctgagacaggaggattgcttaagcccaggagctcaagtcccacctgggcaacatagtaagatcttgtctcttaaaaaaaaaaaaaaaa

SEQ ID NO: 2301 - protein, 273 aa, Homo sapien
MEANMPKRKEPGRSLRIKVISMGNAEVGKSCIIKRYCEKRFVSKYLATIGIDYGVTKVHVRDREIKVNIFDMAGHPFFYEVRNEFYKDTQGVILVYDVGQKDSFDALDAWLAEMKQELGPHGNMENIIFVVCANKIDCTKHRCVDESEGRLWAESKGFLYFETSAQTGEGINEMFQTFYISIVDLCENGGKRPTTNSSASFTKEQADAIRRIRNSKDSWDMLGVKPGASRDEVNKAYRKLAVLLHPDKCVAPGSEDAFKAVVNARTALLKNIK

SEQ ID NO: 2302 - DNA, 4357 bp, Homo sapien
atagtcaccagaagctggaagagtcaaaggacacattctcccctcaagccccagtgggagcacggcccagctggattttggacttctggcctccagaactagacagggcctcacggtgtcacccagggtggaatacagtggtgtgatcatagctcactgcagcctggaattcctgggctcaagcaaccctgccacctcagccttccaagtagctaggactacagaacatccatgatagcagtcttctgtaaatcgaacttttcaagaattctctgaaggaaccaagtaggatattcttacatcatgacttaatgtgaatgcaagaacaagaaataggttttatctctaaatataatgaagggctgtgtgtaaacactgaccctgtctcaattctaacaagcattttagacatgagtttacatcggcaaatgggttcagatcgagatcttcagtcctctgcttcatctgtgagcttgccttcagtcaaaaaggcacccaaaaaaagaagaatttcaataggctccctgtttcggaggaaaaaagataacaaacgtaaatcaagggagctaaatggcggggtggatggaattgcaagtattgaaagtatacattctgaaatgtgtactgataagaactccattttctctacaaatacctcttctgacaatggattaacttccatcagcaaacaaattggagacttcatagagtgccctttgtgccttttgcggcattctaaagacagatttcctgatataatgacttgtcatcacagatcttgtgtggattgcttacgacaatatttaaggatagaaatctctgaaagcagagttaatattagttgcccagaatgtactgagcggtttaatccccatgatattcgcttgatattaagtgatgatgtcttgatggaaaaatacgaagaatttatgcttagacggtggcttgttgcagatcctgattgtaggtggtgtccagctccagactgtggatatgctgtgatagcatttggatgtgccagctgtccaaaattaacttgtgggcgagagggctgtggaacagagttttgctaccactgtaaacagatttggcaccccaaccagacctgtgatgctgctcgacaagagagagcccagagcttacgtttgagaactatacgttcttcatccattagttatagtcaagagtctggagcagcagctgatgatataaagccatgtccacgatgtgctgcttatataataaagatgaatgatgggagctgcaatcacatgacatgtgctgtttgtggttgtgagttttgttggttgtgtatgaaagaaatctcagatttgcattatctaagtccatcaggatgtactttttgggggaagaaaccctggagccgaaagaagaaaatattgtggcaactgggaacactggttggtgctcctgtcggaatcgctttaatagctggcattgctattcctgcaatgattattggcattcctgtgtatgtgggccgcaagattcacaatcgctatgaaggcaaggatgtttcaaagcacaaacggaatttggccatagcaggtggtgtaacgttgtctgtaatcgtgtctccagtagtagctgcagtgactgtaggtatcggtgttcctattatgttagcttatgtctatggcgtagttccaatttctctttgtcgaagcggaggttgtggagtctcagcaggcaatggaaaaggagttaggattgaatttgatgatgaaaatgatataaatgttggtggaactaacacagctgtagacacaacatcagtagcagaagcaagacacaacccaagcataggggagggaagtgttggtgggctgactggcagtttgagtgcaagtggaagccacatggatcgaataggagccatccgagacaacctgagtgaaacggccagcaccatggcactagctggagccagtataacggggagtctgtcaggaagtgccatggtaaactgttttaacaggttggaagtacaagcagatgtacagaaagaacggtacagtctaagtggagaatctggcacagtcagcttgggaacagttagtgataatgccagcaccaaagcaatggcaggatccattctgaattcctacatcccattggacaaagaaggcaacagtatggaggtgcaagtagatattgagtcaaagccatccaaattcaggcacaacagtggaagcagtagtgtggatgatggcagtgccacccgaagttatgctggcggttcatccagtggcttgcctgaaggtaaatctagtgccaccaagtggtccaaagaagcaacagcagggaaaaaatcaaaaagtggtaaactgaggaaaaagggtaacatgaagataaatgagacgagagaggacatggatgcacagttgttagaacaacaaagcacgaactcaagtgaatttgaggctccatccctcagtgacagtatgccttctgtagcagattctcactctagtcatttttctgaatttagttgttctgacctagaaagcatgaaaacttcttgtagtcatggttccagtgattatcacacccgctttgctactgttaacattcttcctgaggtagaaaatgaccgtctggaaaattccccacatcagtgtagcatttctgtggttacccaaactgcttcctgttcagaagtttcacagttgaatcatattgctgaagaacatggtaacaatggaataaaacctaatgttgatttatattttggcgatgcactaaaagaaacaaataacaaccactcacatcagacaatggaattaaaagttgcaattcagactgaaatttaggcccataaatgctgcagaataattaccactgtacaaccgtgtttggagctggttgaactacatgtgactacttaagtttcaggttaccagcaaaagccgggtttcattatcataatgcagatacattttctgtgttcagcaaggcattgtgtgtcatgtggatcttagttaccaaactatgaagtgaaggctttaaaagtgcattattttaaggataataaatttgaagagcaaagcatgttttgtgtgtttgccacaaaacattgcttgaagcacatacttagatagaaattggtcttaatttatataatcaatataaaatactaatgcaattctacagcattcaaatgaagaaaacttgaggctttagggataagtggttagtgatattttattgaaaccactaaagagataagtttaaaagaactgcataggttactctcagtatatgatactctgtaacatttctatttatatcggcataaatttcattttttttcttcatatgcaatgtggttatataaagcttaatgcagctcatttgctaccatttggatacttagacactttgagcaagattgtggcagtttttgcacaactttgaaatagaaatacctggtactctatcttgtttattgttgatgccatcttagaggaaaaaatgtaaaggtaagtaattaagcatatgacagcaacaaataagatacataaaactacaaaataaagtcccattaggttataagtattacaaaaaatccacctttctctaaggggaagtttgtaccccattgattcttggtgcctttgggatcgactgggttttaatggcctagttatttgaggattttgctgtgttgttttccatgtcttctctggtcaccttggattatatataaaaatacaggaaatagataaacatgaatgtgattaataatgctgaaaaagtattagcctaccaaagacacactcaggctttagtgaataactttacataacctcagtttttaacacatgcatatcttctccaaccatgaaatcaaagcacggtgcagaacttgtaccaagtacaaaaggtccatgtatgattagcattattttcttttgcttttgtttatggacaatgttcagctgacataagcagaagttggccaaaatactgcctgtactgttaatttcctgtataattcacttaaataaaagcaggttaacctcaatgatagcagttaaaatgttctatcttatgtatttcttttaagtattaccattatggtgctactgagcgttttcttttggtaaaaagaaaaatgccatgggctgcagtcttcttccatcacttttccctaccaggtccattaatatgcttataacactagtgccagttattttatttgataatgcttatggtatttgtatatttgtttgcattccaattttgtttaataatgagtgtgtaaactgcatacgttaaataaatgtaaatactaatgtactgctgcaaaaaaaaaaaaaaaaaaaaaaaaaaa

SEQ ID NO: 2303 - protein, 838 aa, Homo sapien
MQEQEIGFISKYNEGLCVNTDPVSILTSILDMSLHRQMGSDRDLQSSASSVSLPSVKKAPKKRRISIGSLFRRKKDNKRKSRELNGGVDGIASIESIHSEMCTDKNSIFSTNTSSDNGLTSISKQIGDFIECPLCLLRHSKDRFPDIMTCHHRSCVDCLRQYLRIEISESRVNISCPECTERFNPHDIRLILSDDVLMEKYEEFMLRRWLVADPDCRWCPAPDCGYAVIAFGCASCPKLTCGREGCGTEFCYHCKQIWHPNQTCDAARQERAQSLRLRTIRSSSISYSQESGAAADDIKPCPRCAAYIIKMNDGSCNHMTCAVCGCEFCWLCMKEISDLHYLSPSGCTFWGKKPWSRKKKILWQLGTLVGAPVGIALIAGIAIPAMIIGIPVYVGRKIHNRYEGKDVSKHKRNLAIAGGVTLSVIVSPVVAAVTVGIGVPIMLAYVYGVVPISLCRSGGCGVSAGNGKGVRIEFDDENDINVGGTNTAVDTTSVAEARHNPSIGEGSVGGLTGSLSASGSHMDRIGAIRDNLSETASTMALAGASITGSLSGSAMVNCFNRLEVQADVQKERYSLSGESGTVSLGTVSDNASTKAMAGSILNSYIPLDKEGNSMEVQVDIESKPSKFRHNSGSSSVDDGSATRSYAGGSSSGLPEGKSSATKWSKEATAGKKSKSGKLRKKGNMKINETREDMDAQLLEQQSTNSSEFEAPSLSDSMPSVADSHSSHFSEFSCSDLESMKTSCSHGSSDYHTRFATVNILPEVENDRLENSPHQCSISVVTQTASCSEVSQLNHIAEEHGNNGIKPNVDLYFGDALKETNNNHSHQTMELKVAIQTEI

SEQ ID NO: 2304 - DNA, 2665 bp, Homo sapien
ggctctgggcatcaccagcggccccagggaaaaagaaagaaatgggaaacagcatgaaatccacccctgcgcctgccgagaggcccctgcccaacccggagggactggatagcgacttccttgccgtgctaagtgactacccgtctcctgacatcagccccccgatattccgccgaggggagaaactgcgtgtgatttctgatgaagggggctggtggaaagctatttctcttagcactggtcgagagagttacatccctggaatatgtgtggccagagtttaccatggctggctgtttgagggcctgggcagagacaaggccgaggagctgctgcagctgccagacacaaaggtcggctccttcatgatcagagagagtgagaccaagaaagggttttactcactgtcggtgagacacaggcaggtaaagcattaccgcattttccgtctgccgaacaactggtactacatttccccgaggctcaccttccagtgcctggaggacctggtgaaccactattctgaggtggctgatggcctgtgctgtgtgctcaccacgccctgcctgacacaaagcacggctgccccagcagtgagggcctccagctcacctgtcaccttgcgtcagaagactgtggactggaggagagtgtccagactgcaggaggaccccgagggaacagagaacccgcttggggtagacgagtcccttttcagctatggccttcgagagagcattgcctcttacctgtccctgaccagtgaggacaacacctcctttgatcgaaagaagaaaagcatctccctgatgtatggtggcagcaagagaaagagctcattcttctcatcaccaccttactttgaggactagccaagaacagacacaatggttcatgcccaaaaggaacagaagttccaactattgcctgggatcttgcgaaaagcgaggttccctgatccctgggagcctcacgtattttagaagccaagagaagccacatggagactcaaattcgcatcttctctatccacatcatgaccaaaggaacccctccctggtgtctgatcagggctgtggcatcacaaaacattggatcatgacatgtcgggcgatgcttggaaaagcccagcatgtatgtatgcacacattgtgtgtgtgggaaggacaaagccactctcacaagaaagggcaccaggactgctctccaaggaactggacctgtccagacagttacactccaaggtcattggagagaacttctgtatgggcaagcctgagagggagaggaaacaaaagctgtgtcctggcagaaggtctgggtttgcagatgggtgccctgaatggaactactttaactaatccatagggacttctggtatgctttcctctctttttaaaggaacttcgtgacactaaacattagcccaaaggacttcttagccttcaattgggagatacctttggtctgctcctgcaccaaagccatatgggtggaagtcagttggcctccctggttctgcagagggccagaagaatgagagagaggaagactgctggcagggaaatcgaggaggcgagactagaactgcaccagcttccctgatgtctgcagccatggctttgcagcgcaaacagaacttctctgggatgctgggattcttgcctgtatgaatgcatcaagtattcatttattgcccgaataggcattgcattaagtcctctgttaggtgtcaggcaagccaaaaaaaaaaaaaagatgctaagtcctaacccccaacagaagtgttcacagtgtagacgggaaaaaatgtataaacaaatgtgtaaaaagagaaatcagctcatggcttaggatggaattagagacaggtgagggacactcaggagctcattttccagctgctcttcagagtggaagggctggctggatcgggtaggtaagaatagctggattttttagaaaagaaatggatacagtctaaagaattaactcacccggtactttattctaagaagggtctggcatccatatgaggaaaaatgctcagctccaggaaagatggggagtccaagtggattaatgatgtcatgcataattttaagagacaagggagaaaacacaatgtatagccagagaaggagaagctcccatccaaatcctactaggaagagagtgggctgcagatgaatctgtgactcatgtttccctgtttcaaagggatcctggggaaggaggggaacatgcttgcagtatctctccctgtctgtctgctcacataagcattccgtccatctaagctcatcgtgctactggtatgtgtatgtgcagttacacagtttcctgtatcataaatcctagtgtgtttatacaaggagacatctgtggtttccccaaccgttccaaaaggctatttcaaaggaaccagcccacgtatgagaaatgaatgtaacactgtggacattgacttcccgcataaggcagggtgaccccctgaactccagatgtttgcacagtatcttatgtgttgttttccgttgtgacgaatgtgattggaacatttggggagcacccagagggatttttcagtgggaagcattacactttgctaaatcatgtatttattcctgattaaaacaaacctaataaatatttaacccttggc

SEQ ID NO: 2305 - protein, 276 aa, Homo sapien
MGNSMKSTPAPAERPLPNPEGLDSDFLAVLSDYPSPDISPPIFRRGEKLRVISDEGGWWKAISLSTGRESYIPGICVARVYHGWLFEGLGRDKAEELLQLPDTKVGSFMIRESETKKGFYSLSVRHRQVKHYRIFRLPNNWYYISPRLTFQCLEDLVNHYSEVADGLCCVLTTPCLTQSTAAPAVRASSSPVTLRQKTVDWRRVSRLQEDPEGTENPLGVDESLFSYGLRESIASYLSLTSEDNTSFDRKKKSISLMYGGSKRKSSFFSSPPYFED

SEQ ID NO: 2306 - DNA, 5286 bp, Homo sapien
gcgcgcctgtcgcggtggtgggtgcaggactggacccacgggcccattgtgcgcccgcccgcggcagccaggaccatgtgggtgaacccggaggaggtgttgctggccaacgcgctgtggatcaccgagagggccaacccatacttcatcctgcagcggaggaagggccacgccggcgatggaggcggcggcggcggactggcgggcctgctggtgggtacccttgatgttgtgttggactccagcgcccgggtcgctccttaccgaatcttgtaccagactccagactccctggtctactggaccatcgcctgtggtggttccaggaaagaaatcactgaacactgggaatggcttgagcaaaatctcttgcagacactctccatctttgaaaatgagaatgatatcaccacatttgtgagaggaaaaatacagggcatcattgcagaatacaacaaaatcaatgatgtaaaggaagatgatgacacggagaagtttaaagaagccattgtgaaatttcataggctgtttgggatgccagaggaagagaaactcgtcaactattactcttgcagctattggaaggggaaggtcccccgtcagggttggatgtacctcagcattaaccacctttgcttttattcttttcttatgggaagggaagcgaaactggtcatccggtgggtagacatcactcagcttgagaagaatgccaccctgcttctgcctgatgtgatcaaagtgagcacacggtccagtgagcatttcttctctgtattcctcaacatcaacgagaccttcaagttaatggagcagcttgccaacatagccatgaggcaactcttagacaatgagggatttgaacaagatcgatccctgcccaaactcaaaaggaaatctcctaaaaaagtgtctgctctaaaacgtgatcttgatgccagggcaaagagtgagagataccgtgcacttttccggctgcccaaagatgaaaaattagatggccacacagactgcactctctggactccatttaacaaaatgcacattttggggcagatgtttgtgtccacaaattacatctgttttaccagcaaggaggagaacttatgtagcctcattatcccgctccgtgaggtgacaattgtggaaaaggcagacagctccagtgtgctccccagtcccttatccatcagcacccgaaacaggatgaccttcctatttgccaacttgaaagatagagactttctagtgcagaggatctcagatttcctgcaacagactacttccaaaatatattctgacaaggagtttgcaggaagttacaacagttcagatgatgaggtgtactctcgacccagcagcctcgtctcctccagcccccagagaagcacgagctctgatgctgatggagagcgccagtttaacctaaatggcaacagcgtccccacagccacacagaccctgatgaccatgtatcggcggcggtctcccgaggagttcaacccgaaattggccaaagagtttctgaaagagcaagcctggaagattcactttgctgagtatgggcaagggatctgcatgtaccgcacagagaaaacgcgggagctggtgttgaagggcatcccggagagcatgcgtggggagctctggctgctgctgtcaggtgccatcaatgagaaggccacacatcctgggtactatgaagacctagtggagaagtccatggggaagtataatctcgccacggaggagattgagagggatttacaccgctcccttccagaacacccagcttttcagaatgaaatgggcattgctgcactaaggagagtcttaacagcttatgcttttcgaaatcccaacatagggtattgccaggccatgaatattgtcacttcagtgctgctgctttatgccaaagaggaggaagctttctggctgcttgtggctttgtgtgagcgcatgctcccagattactacaacaccagagttgtgggtgcactggtggaccaaggtgtctttgaggagctagcacgagactacgtcccacagctgtacgactgcatgcaagacctgggcgtgatttccaccatctccctgtcttggttcctcacactatttctcagtgtgatgccttttgagagtgcagttgtggttgttgactgtttcttctatgaaggaattaaagtgatattccagttggccctagctgtgctggatgcaaatgtggacaaactgttgaactgcaaggatgatggggaggccatgaccgttttgggaaggtatttagacagtgtgaccaataaagacagcacactgcctcccattcctcacctccactccttgctcagcgatgatgtggaaccttaccctgaggtagacatctttagactcatcagaacttcctacgagaaattcggaactatccgggcagatttgattgaacagatgagattcaaacagagactgaaagtgatccagacgctggaggatactacgaaacgcaacgtggtacgaaccattgtgacagaaacttcctttaccattgatgagctggaagaactttatgctcttttcaaggcagaacatctcaccagctgctactggggcgggagcagcaacgcgctggaccggcatgaccccagcctgccctacctggaacagtatcgcattgacttcgagcagttcaagggaatgtttgctcttctctttccttgggcatgtggaactcactctgacgttctggcctcccgcttgttccagttattagatgaaaatggagactctttgattaacttccgggagtttgtctctgggctaagtgctgcatgccatggggacctcacagagaagctcaaactcctgtacaaaatgcacgtcttgcctgagccatcctctgatcaagatgaaccagattctgcttttgaagcaactcagtacttctttgaagatattaccccagaatgtacacatgttgttggattggatagcagaagcaaacagggtgcagatgatggctttgttacggtgagcctaaagccagacaaagggaagagagcaaattcccaagaaaatcgtaattatttgagactgtggactccagaaaataaatctaagtcaaagaatgcaaaggatttacccaaattaaatcaggggcagttcattgaactgtgtaagacaatgtataacatgttcagcgaagaccccaatgagcaggagctgtaccatgccacggcagcagtgaccagcctcctgctggagattggggaggtcggcaagttgttcgtggcccagcctgcaaaggagggcgggagcggaggcagtgggccgtcctgccaccagggcatcccaggcgtgctcttccccaagaaagggccaggccagccttacgtggtggagtctgttgagcccctgccggccagcctggcccccgacagcgaggaacactcccttggaggacaaatggaggacatcaagctggaggactcctcgccccgggacaacggggcctgctcctccatgctgatctctgacgacgacaccaaggacgacagctccatgtcctcatactcggtgctgagtgccggctcccacgaggaggacaagctgcactgcgaggacatcggagaggacacggtcctggtgcggagcggccagggcacggcggcactgccccggagcaccagcctggaccgggactgggccatcaccttcgagcagttcctggcctccctcttaactgagcctgccctggtcaagtactttgacaagcccgtgtgcatgatggccaggattaccagtgcaaaaaacatccggatgatgggcaagcccctcacctcggccagtgactatgaaatctcggccatgtccggctgacacgggcgccttcccgggggagtgggaggagagggaggggagggattttttatgttcttctgtgttgagttttttctttctttcttttaaattaaatatttattagtacctggcttgaagcctagtgttttcataatgtaattcaatgaaaactgttggagaaatatttaaacacctcaatgtaggtacattacactcttgttgcggggaggggatttaccagaatacagtttatttcgtgaattctaaaaaacaaaaagatgaatctgtcagtgatatgtgtgtattataacttattaatcttgctgttgagctgtatacatggtttaaaaaatagtactgtttaatgctaagtaaggcagcagtcatttgtgtattcaggctttttaaataaaattagagctgtaaggaaaatgaaaagccacaaatgcaagactgttcttaaatggaaggcatagtcagcgagggtaaatcctataccactttaggaagtattaaaaatatttttaagatttgaaatatatttcatagaagtcctctattcaaaatcatattccacagatgttccccttcaaagggaaaacatttggggttctaaacagttatgaaagtaagtgatttttacatgattccagaataacacttgtattgaccaatttagacagataccagaccaattttgcatttaagaaattgttctgattatttacgtcaactcattagaattcagtgaaaagtaacagtcttttgtcacagagaatctgaaagtagcagcaaagacagagggctcatgacaggtttttgcttttgctttgcttttgtttttgaaagagtaaaagtactgatgcttctgatactggatgtttagcttcttactgcaaaaacataagtaaaacagtcaactttaccatttccgtattctccatagattgaagaaatttataccacatatcgcatatgaccatctttccatcaaatcaatgtagagataatgtaaactgaaaaaaaatctgcaagataatgtaactgaatgttttaaaaacagaacttgtcactttatataaaagaatagtatgctctatttcctgaatggatgtggaaatgaaagctagcgcacctgcactttgaattcttgcttcttttttattactgttatgattttgctttttacagatgttggacgattttttcttctgattgttgaattcataatcatggtctcatttcctttgcttctttggaatatttctttcaacacattcctttattttattatacattgtgtcctttttttagctattgctgctgttgttttttattctatttacaggatgatttttaaactgtcaaatgaagtagtgttaacctcaaataggctaaatgtgaacaaataaaatacagcaaatactc

SEQ ID NO: 2307 - protein, 924 aa, Homo sapien
NLCSLIIPLREVTIVEKADSSSVLPSPLSISTRNRMTFLFANLKDRDFLVQRISDFLQQTTSKIYSDKEFAGSYNSSDDEVYSRPSSLVSSSPQRSTSSDADGERQFNLNGNSVPTATQTLMTMYRRRSPEEFNPKLAKEFLKEQAWKIHFAEYGQGICMYRTEKTRELVLKGIPESMRGELWLLLSGAINEKATHPGYYEDLVEKSMGKYNLATEEIERDLHRSLPEHPAFQNEMGIAALRRVLTAYAFRNPNIGYCQAMNIVTSVLLLYAKEEEAFWLLVALCERMLPDYYNTRVVGALVDQGVFEELARDYVPQLYDCMQDLGVISTISLSWFLTLFLSVMPFESAVVVVDCFFYEGIKVIFQLALAVLDANVDKLLNCKDDGEAMTVLGRYLDSVTNKDSTLPPIPHLHSLLSDDVEPYPEVDIFRLIRTSYEKFGTIRADLIEQMRFKQRLKVIQTLEDTTKRNVVRTIVTETSFTIDELEELYALFKAEHLTSCYWGGSSNALDRHDPSLPYLEQYRIDFEQFKGMFALLFPWACGTHSDVLASRLFQLLDENGDSLINFREFVSGLSAACHGDLTEKLKLLYKMHVLPEPSSDQDEPDSAFEATQYFFEDITPECTHVVGLDSRSKQGADDGFVTVSLKPDKGKRANSQENRNYLRLWTPENKSKSKNAKDLPKLNQGQFIELCKTMYNMFSEDPNEQELYHATAAVTSLLLEIGEVGKLFVAQPAKEGGSGGSGPSCHQGIPGVLFPKKGPGQPYVVESVEPLPASLAPDSEEHSLGGQMEDIKLEDSSPRDNGACSSMLISDDDTKDDSSMSSYSVLSAGSHEEDKLHCEDIGEDTVLVRSGQGTAALPRSTSLDRDWAITFEQFLASLLTEPALVKYFDKPVCMMARITSAKNIRMMGKPLTSASDYEISAMSG

SEQ ID NO: 2308 - DNA, 375 bp, Homo sapien
accaactagaaactccaatatagtcttctgtttttatgtcaatgcatttgcaatcagatttcagaatcctaacaggtaaattggagtctacgaaaattttataataattgcttcatggactctgagctatagtctatatcttagttttttcaaacattttgactattttgaccaagccagcttgcagtacagaaaaaagtgaaaaatgtttctccttctgaatgcattcttaccactttgattctttctgtttctactatccatataaatacttttctgacccttttgttagacaaggaaaagtttcttttgttattttgttttgttaaatgtaaggaatgagacaggccaaacagtgaagataaacaatagatc

SEQ ID NO: 2309 - DNA, 1807 bp, Homo sapien
agagggaaagcgagagggagacggacgttgagagaacgaggaggaaggagagaaaatggcgtccacggattacagtacctatagccaagctgcagcgcagcagggctacagtgcttacaccgcccagcccactcaaggatatgcacagaccacccaggcatatgggcaacaaagctatggaacctatggacagcccactgatgtcagctatacccaggctcagaccactgcaacctatgggcagaccgcctatgcaacttcttatggacagcctcccactggttatactactccaactgccccccaggcatacagccagcctgtccaggggtatggcactggtgcttatgataccaccactgctacagtcaccaccacccaggcctcctatgcagctcagtctgcatatggcactcagcctgcttatccagcctatgggcagcagccagcagccactgcacctacaagaccgcaggatggaaacaagcccactgagactagtcaacctcaatctagcacagggggttacaaccagcccagcctaggatatggacagagtaactacagttatccccaggtacctgggagctaccccatgcagccagtcactgcacctccatcctaccctcctaccagctattcctctacacagccgactagttatgatcagagcagttactctcagcagaacacctatgggcaaccgagcagctatggacagcagagtagctatggtcaacaaagcagctatgggcagcagcctcccactagttacccaccccaaactggatcctacagccaagctccaagtcaatatagccaacagagcagcagctacgggcagcagagacccatggatgaaggaccagatcttgatctaggccctcctgtagatccagatgaagactctgacaacagtgcaatttatgtacaaggattaaatgacagtgtgactctagatgatctggcagacttctttaagcagtgtggggttgttaagatgaacaagagaactgggcaacccatgatccacatctacctggacaaggaaacaggaaagcccaaaggcgatgccacagtgtcctatgaagacccacccactgccaaggctgccgtggaatggtttgatgggaaagattttcaagggagcaaacttaaagtctcccttgctcggaagaagcctccaatgaacagtatgcggggtggtctgccaccccgtgagggcagaggcatgccaccaccactccgtggaggtccaggaggcccaggaggtcctgggggacccatgggtcgcatgggaggccgtggaggagatagaggaggcttccctccaagaggaccccggggttcccgagggaacccctctggaggaggaaacgtccagcaccgagctggagactggcagtgtcccaatccgggttgtggaaaccagaacttcgcctggagaacagagtgcaaccagtgtaaggccccaaagcctgaaggcttcctcccgccaccctttccgcccccgggtggtgatcgtggcagaggtggccctggtggcatgcggggaggaagaggtggcctcatggatcgtggtggtcccggtggaatgttcagaggtggccgtggtggagacagaggtggcttccgtggtggccggggcatggaccgaggtggctttggtggaggaagacgaggtggccctggggggccccctggacctttgatggaacagatgggaggaagaagaggaggacgtggaggacctggaaaaatggataaaggcgagcaccgtcaggagcgcagagatcggccctactag

SEQ ID NO: 2310 - protein, 583 aa, Homo sapien
MASTDYSTYSQAAAQQGYSAYTAQPTQGYAQTTQAYGQQSYGTYGQPTDVSYTQAQTTATYGQTAYATSYGQPPTGYTTPTAPQAYSQPVQGYGTGAYDTTTATVTTTQASYAAQSAYGTQPAYPAYGQQPAATAPTRPQDGNKPTETSQPQSSTGGYNQPSLGYGQSNYSYPQVPGSYPMQPVTAPPSYPPTSYSSTQPTSYDQSSYSQQNTYGQPSSYGQQSSYGQQSSYGQQPPTSYPPQTGSYSQAPSQYSQQSSSYGQQRPMDEGPDLDLGPPVDPDEDSDNSAIYVQGLNDSVTLDDLADFFKQCGVVKMNKRTGQPMIHIYLDKETGKPKGDATVSYEDPPTAKAAVEWFDGKDFQGSKLKVSLARKKPPMNSMRGGLPPREGRGMPPPLRGGPGGPGGPGGPMGRMGGRGGDRGGFPPRGPRGSRGNPSGGGNVQHRAGDWQCPNPGCGNQNFAWRTECNQCKAPKPEGFLPPPFPPPGGDRGRGGPGGMRGGRGGLMDRGGPGGMFRGGRGGDRGGFRGGRGMDRGGFGGGRRGGPGGPPGPLMEQMGGRRGGRGGPGKMDKGEHRQERRDRPY

SEQ ID NO: 2311 - DNA, 2764 bp, Homo sapien
agacgcgcaagggcgccgatggaggcagactcgccagcgggccccggcgccccagagcccctcgcggagggagcggcggccgagttctccagcctgctgcgcaggataaaaggcaaactcttcacctggaatattttgaaaacaattgccctgggtcagacgttgtccttgtgtatatgtgggacagccatcaccagccagtatttggcagaaagatacaaagtgaacacccccatgcttcagagctttatcaattattgcttgctgttcctaatttatacagtgatgctggcatttcgatcaggcagtgataaccttttagtaatcttgaaaagaaaatggtggaagtacatcctgctgggactagcagatgtggaagctaattatgtgatcgtcagagcctaccagtacacaactctaaccagtgtccagcttttggattgctttgggattcctgtgttgatggctctgtcatggtttattcttcatgcaagatacagagtgatccacttcatcgccgtggctgtctgtctgttgggtgtaggaaccatggttggtgcagacatactagcagggagggaagacaattcagggagtgatgtattgattggtgacatcttggtccttcttggggcttccctctatgccatttcaaatgtttgtgaggaatacatcgtgaagaagctgagcagacaggagtttttaggaatggtgggcctgtttggaacaattatcagtggtatacagctattgattgtggaatataaggatattgccagcattcattgggactggaaaattgccctgctgttcgtggcatttgccctgtgtatgttttgcctgtacagcttcatgccattggtgattaaagtcactagtgccacttccgtcaacctgggcatcctgacagcggacctctacagcctttttgttggactctttctgtttggctataagttttcaggactctacatcctgtccttcactgtcatcatggtggggtttatcctgtactgctccacccctactcgcacggccgagccggctgaaagcagcgtgcctccagtcaccagcattgggattgacaacctggggctgaagctggaggagaacctccaggagacccactctgctgtcttgtagctggagaagatggcgcacccatcccccaccaggataaagcagagcctgctgcctgctgaggggacacttggggaaatagcagactcagaatggacactctacaaccctgggttggatccagtggttaggttttagaaaggaacactgaacaaagttcaaaagtagaaataccaaaatagagcagaaaccaagctaagagtgtgtttctgtgtttgaggaccaatatctgttcgtgttgaggagatgaggtgcagactccacactggggtcttagaggcaccggtgggaaagcaggactggggagagatccaggactgagccagcctcaggccagggcgggaaagcaggctgtccaggctgggcttggtggtcaggaacaggggcagctcacggtggctctggagtacgtttcctctgtcagatgcttcaaggtttttttttttttttttttttgctgaggcagttattgtccacaggcctttgggtacagatgaggcctcggggctgactgcatgtggcagaaaacgggtgggtcagcccttgaaaagtcttgagatataagtgtgagtactatacaagcattaaactggagtgcagtaaacctaggaaccttcccacaattgtttttttgtttgtttgagatgcagagtctagagtgcagtggtgcaagctcagcttactgtaacctctgcctcctggattcaagtgttagtagctgggattacaaaagcatgtggccccacgcccagctaagttttgtatttttagtagacatggggtttcaccatgttgcccaggctggtcttgacctcccgacctcaagtgatctgcctgccccgacctcccaaagtgctgggattacaggcttgagccaccgtgccaggcctgttttgtttgtttttgtagagagatggggtttcgccatgttgcccaggctaatctcaaattcctgagctaaagcgatctgcccacctcggcctccgaaagtgctaggattacagatgtgaaccactgtgcctggcctgtttgtttgtttgtttaaaacatttctccatcactcattccaggtcccagagcaaactctctctgctctcggagcctgtgacactggctatgtgctccacagtttcagtcccaggtcatactctccaacagttttcagagctccatatatatgtagatgccatcctttctaaaaacttctcacgacctcctggaatattcctattgatctcattttatttagcatcagctcaagaaactaagtcttagtgcacagtatcacaacaaagaaaaagctttgtttttataactggtaaaaacaagaaaagattctcatcaaaatgaaaatataaaattaatcatttctcaccaaagagtatgcctgggagcctccagctgttaaaagacaatgctattactacttcttatcaaaaatctgtaatgccctgtgatttttatgatacttcttcaatacaaagtgttaatatgtgtcatcagtataataacaaccaacaaaatgccactttcagaaaactgtatgtaaattttttgtaacaatgtaaaaaagaaatggggagtaagtgttcacatcattaaaaggctttgaattcatggaaat

SEQ ID NO: 2312 - protein, 374 aa, Homo sapien
MEADSPAGPGAPEPLAEGAAAEFSSLLRRIKGKLFTWNILKTIALGQTLSLCICGTAITSQYLAERYKVNTPMLQSFINYCLLFLIYTVMLAFRSGSDNLLVILKRKWWKYILLGLADVEANYVIVRAYQYTTLTSVQLLDCFGIPVLMALSWFILHARYRVIHFIAVAVCLLGVGTMVGADILAGREDNSGSDVLIGDILVLLGASLYAISNVCEEYIVKKLSRQEFLGMVGLFGTIISGIQLLIVEYKDIASIHWDWKIALLFVAFALCMFCLYSFMPLVIKVTSATSVNLGILTADLYSLFVGLFLFGYKFSGLYILSFTVIMVGFILYCSTPTRTAEPAESSVPPVTSIGIDNLGLKLEENLQETHSAVL

SEQ ID NO: 2313 - DNA, 2028 bp, Homo sapien
cattaaaaataaagggcattcacccatatcattctctgagctataccagtggagacactgccactgattctccagtgcatgttggacgtgctgggatgccagtaaaggacagtccaaggaaggagagcctactcagctacctgactggaagcttcccaagcctgcacaacctcctggaaggtactcctcagagaagcagtgctgctgtgaaaagtagctccctaacgagaacaggaaatacagtagccactgatatgttatctgaacatcccttgctatctgagccatcatctgtgagtttctataattggatgtcaaatgctgtgggtaatcgaggaagtgtgttacaagaatctcctgttacaaaatcaggacacaatagtcttcccacaggtgttgcacccaatcttccaacaataccctcagcctcagatttcaacactgtcttgtctagtgaccaaaatactttggatgggacacattctcagcatagcaccagtcaggatgatgtggcaggtgtagaagaagcaaaccaagggtttcctgctgttcagcttgctgatgcacaggttgttttcaagcctcttctgagtcatacagggatccagtcacaggatacaatgccattctgctaccgaatgtactttggagaacacctttcattttcagggactttggactgcctcagagcagatattgtggattcagacacagccaaagagagaaaaggcaaaagagcaagaaggcaaggccatgtgaatcttcctccacttgagttcaaaccagcattaatgttgggaacctttagcatcagtgctgttgtaatggaaaagtccgtgtgcacccctcagaactctaccagtgccctttcttttcatgatctcagcaagcggtattataacacctttcactgcaactttactatttcctgtcagtcaataagccagcatgtagatatggctttggttcgtcttattcatcagtttagcacaatgatagatgacatcaaagcaactcagactgatattaaacttagcagatatacagccggatctgcttccccaacacctaccttcaaaaccagaaaacatcgggactttcgttcatctgactttagccgcagttctagaggaagtcttaatggtggcaatagagtaaataatgcaaagaacaaacggaccaacaatgagaataacaaaaaggaatctcgaaacaagaattcattaggaagatctgaaagaagaacatcaaaagtgtctaggaaaggttcaaaagatgtggtggatcacatgactattcatatggatgactctgattcaattacagtgtcagaacaaagtgagccttcagctgagtgctggcagaatatgtataaattgcttaacttctattcacttatctccgatccaacaggaatattggaaaagtcttcagaaacatttggaccagcaggagttcggagccctacagagccaacatgtaaagttgtgtttgagaatgaacaagacaacagcagtttgactaagactcagaggaaacgtagcttggtaacttctgaacctcagcatgttactctaatagtgtttgggattggcatggtgaaccgcacacacctagaggcagatattggtggactaacaatggaatcagaactgaagaggatccatggcagttttactcttaaggaaaaaatgaaagatgttttacatcaaaagatgactgagacttgtgctactgctcatattggtggggttaatattgtgctgcttgaagggattacaccaaatatacaactggaggattttcctacatctcctacaagtacagccaaacaagagtttctgtatgtcatattattctttttcatggctttgtaattactgtagtattgaatagtttttaaaatatttaaatttttttcatggctgtgaattatttagttattgttttgtagctgtaatataggcccttttatataatagattaaagcttactggtaatcaaggaaaaaaaaaaaaaaaaaaaaaa

SEQ ID NO: 2314 - protein, 593 aa, Homo sapien
MPVKDSPRKESLLSYLTGSFPSLHNLLEGTPQRSSAAVKSSSLTRTGNTVATDMLSEHPLLSEPSSVSFYNWMSNAVGNRGSVLQESPVTKSGHNSLPTGVAPNLPTIPSASDFNTVLSSDQNTLDGTHSQHSTSQDDVAGVEEANQGFPAVQLADAQVVFKPLLSHTGIQSQDTMPFCYRMYFGEHLSFSGTLDCLRADIVDSDTAKERKGKRARRQGHVNLPPLEFKPALMLGTFSISAVVMEKSVCTPQNSTSALSFHDLSKRYYNTFHCNFTISCQSISQHVDMALVRLIHQFSTMIDDIKATQTDIKLSRYTAGSASPTPTFKTRKHRDFRSSDFSRSSRGSLNGGNRVNNAKNKRTNNENNKKESRNKNSLGRSERRTSKVSRKGSKDVVDHMTIHMDDSDSITVSEQSEPSAECWQNMYKLLNFYSLISDPTGILEKSSETFGPAGVRSPTEPTCKVVFENEQDNSSLTKTQRKRSLVTSEPQHVTLIVFGIGMVNRTHLEADIGGLTMESELKRIHGSFTLKEKMKDVLHQKMTETCATAHIGGVNIVLLEGITPNIQLEDFPTSPTSTAKQEFLYVILFFFMAL

SEQ ID NO: 2315 - DNA, 1836 bp, Homo sapien
ataattcactggaagtgtgacatagatgtatcaaagggagcattgctagaagggcagctagtgatttccatagaaggattaaattctaagcaccaggcaaatgctcttcattgtgtaacaactagatggagtctcactctgttacccaggccggagtgcagtggcgcagtctcggctcactgcaacctccacctcccaggttcaagtgattctcatgcctcagtcccccgagtagctgggattacagatgcccaccaccatgcctggctaattatggttgcttctgcaggaagcctttttggtggcatggtcctcaagaagttcctaaaagaaatacagtccatactgcccggaatctctgcaaagctgacttggacttcagaggaaggcagctattctcaggatatgacaggggtaacacccttccagatgatttttgaggttgatgaaaagcccagaaccttgatgacagattgtctggttataaagcattttttacgtaaaatcatcatggtgcaccctaaggtcagatttcatttcagtgtaaaggtaaatggaatcctctccacagagatctttggggtggagaatgaacccactttgaaccttgggaatggaattgctcttttggtcgactcccagcattatgtgagaccaaattttggtacaattgaatcacactgcagcagaattcaccctgtgctaggacatccagtaatgcttttcatccctgaagacgtggctggcatggacttgttgggagaactgatactgactccagcagctgcactgtgccccagcccaaaggtttcttccaaccagcttaacaggatttcttcagtttccatatttctatatggacctttgggtctgcctctgatattgtcaacttgggagcagccgatgactactttcttcaaagatacctcttctttagttgactggaaaaaataccatttgtgtatgatacccaatttggatctcaatttggatagagatttggtgcttccagatgtgagttatcaggtggaatccagtgaggaggatcagtctcagactatggatcctcaaggacaaactctgctgctttttctctttgtggatttccacagtgcatttccagtccagcaaatggaaatctggggagtctatactttgctcacaactcatctcaatgccatccttgtggagagccacagtgtagtgcaaggttccatccaattcactgtggacaaggtcttggagcaacatcaccaggctgccaaggcagctgacacacaagagttcaggaccaaactgcacaaagtatttcgtgagatcacccaacaccaatttcttcaccactgctcatgtgaggtgaagcagcagctaaccctagaaaaaaaggactcagcccagggcactgaggacgcacctgataacagcagcctggagctcctagcagataccagcgggcaagcagaaaacaagaggctcaagaggggcagcccccgcatagaggagatgcgagctctgcgctctgccagggccccgagcccgtcagaggccgccccgcgccgcccggaagccaccgcggcccccctcactcctagaggaagggagcaccgcgaggctcacggcagggccctggcgccgggcagggcgagcctcggaagccgcctggaggacgtgctgtggctgcaggaggtctccaacctgtcagagtggctgagtcccagccctgggccctgagccgggtccccttccgcaagcgcccaccgatccggaggctgcgggcagccgttatcccgtggtttaataaagctgccgcgcgctcaccaaaaaaaaaaaaaaaaa

SEQ ID NO: 2316 - protein, 485 aa, Homo sapien
MVASAGSLFGGMVLKKFLKEIQSILPGISAKLTWTSEEGSYSQDMTGVTPFQMIFEVDEKPRTLMTDCLVIKHFLRKIIMVHPKVRFHFSVKVNGILSTEIFGVENEPTLNLGNGIALLVDSQHYVRPNFGTIESHCSRIHPVLGHPVMLFIPEDVAGMDLLGELILTPAAALCPSPKVSSNQLNRISSVSIFLYGPLGLPLILSTWEQPMTTFFKDTSSLVDWKKYHLCMIPNLDLNLDRDLVLPDVSYQVESSEEDQSQTMDPQGQTLLLFLFVDFHSAFPVQQMEIWGVYTLLTTHLNAILVESHSVVQGSIQFTVDKVLEQHHQAAKAADTQEFRTKLHKVFREITQHQFLHHCSCEVKQQLTLEKKDSAQGTEDAPDNSSLELLADTSGQAENKRLKRGSPRIEEMRALRSARAPSPSEAAPRRPEATAAPLTPRGREHREAHGRALAPGRASLGSRLEDVLWLQEVSNLSEWLSPSPGP

SEQ ID NO: 2317 - DNA, 2401 bp, Homo sapien
ctgactctgtctgggcattcttcctgggctagagatgctctgcctcccagcagaagacaagagccctagaaagactgtcattcatttactggagagagaaatggttcatctacacacacactcagagcctggctagctacaaagccgtggtccgtggtaggatgtacgtcttagtggaataagtaaccttgagcagacaatggatccagcagtaacaagcctgccctgatgccggcgtaaattccgaaggagctggagaacgattcttcccttcactttatctaaatcctctgaaggatgagtgggaggatggtttcttctcccttcctgaaggttgttttgttggtgccttatgctaagagaactcagcagatacaaatttattattttcttttagacagcattttccctgcagttagaagaaaacagcagctcacattgaaaaatatctaattcccaaaatacgtgattccaatagggagtttatagaatttgcttcttaccaaagcaaaatcttgaatacatgaaatctaaaatcttgccaatttaatgaatgcctaataatttttaaatagcatatatcattttaatacattaaatagttggaagattgttgagggataatttgtcaattttttattaaaaagaaaattcataaaaattaaatattctacatttattttatattattatcttggcaattttattttttatgacaaaattctgagtctgttatattatccaaatcctaaaaagatttaattgattacagaaaaatgtattgggaaaaattgctttgcccctcttttttctctaagcaattcctgagttttaaaaatactccttaaaggaactaatttatttttcatggcccatcaccaatatccaagagagtaaccaatttttaaattctgaaccctgtcttgtgtgactttcaaactaaatgaaatgaagaggcctcaggcagtctgtgtttacacagggtggcaaaattaaccttaagttacttggatcactgcactggggacacttcagagcctctactcaggctacttttgagcatactatgtatgtcgctgtgcagaagcctacctctttcactctagataaaacaagactttctgagcacttactctgagcaaagcaccgtgccgcaagtacaaaggtggataagactcagtccttgatttgatggtctttgttggaataggttttcaaactgtaatgtcactgtgtctcccaggggccaaaagtttgctttcattgatgggtttcaaagtagggatgagtttacttataagtacacattgtgtcattagtatgcttgactctccatggtgcaaaatttctttctaatgctgatcaattgcaaacatgatagaacaatgaaatacttccaggacattctaaatcactctcctccttgtgagaaaatagggtagagagcctagcctggtacaggcagccatccatgtctgatgtgggtcatctctgagaatgacactcctcaaagggccagagggtgctctttcttcatttcccttacacatgggtgttattcaatacttatctacagccatgtgtcacttaacaactggaatatgttccaagaaatctgtcattaggctattttgttattgtgtgatcacagagtgtacttacacaaacctagggtggtatagttcactgtaccaccaaggccatatagtgtagcctaggctacaatatacctaggctatatagtatagcctgtagctcctaggctacaaacctggacagcatgttactgcactgagtactgtagcaattgttacacagtggtaactatttgtgtatctaaacatatctaaacatagaaaagatacagtaaaaatacagcagtataatcttatgggaccaccgttgtatatgtggtccatcgttgatggaaacattgttatgtggcacatgactgtatatgcttcgtatatagtgaacattcagcaaaggttttcatcaatgaatggataaattggcaacttttatgggcttaattgggctaaaatatatacggagtcactatttgacttaacacctagacattattttactgatatttttcaataattctgtttttgtaaagccttccttccatttgggtgcaatttccacttggggaaaatctcattccccatcctcttgtaattaaaaagcatggtttgtttgttttgtaactcaaagtaaattgagcaaaaaaaaaaaaaaaaaaaaaaaaaaaaaaaaaaaaaaaaaaaaaaaaaaaaaaaaaaaaaaaaaaaaaaaaaaaaaaaaaaaaaaaaaaaaaaaaaaaaaaaaaaaaaaaaaaaaaaaaaaaaaaaaaaaaaaaaaaaaaaaaaaaaaaaaaaaaaaaaaaaaaaaaaaa

SEQ ID NO: 2318 - DNA, 2990 bp, Homo sapien
gcggttcctctaggaaaattcctttgtgcagatcaggcccgtggattggtgagtgaatcctaaccacgtcttccctggcctgtcttcactcttctccccagaatcaccacttctgcactggtgtctgaaggtgtattgagtgattttgtggagggcagaagtaggaagtctttgggacaaaactgtatttaccttgggatctgtgaacaagaggaacctcagcagccaggacaggcaggagcagtggaatagctactatggcttctggaatcctggttaatgtaaaggaggaggtgacctgccccatctgcctggaactcctgacacaacccctgagcctggactgcggccacagcttctgccaagcatgcctcactgcaaaccacaagaagtccatgctagacaaaggagagagtagctgccctgtgtgccggatcagttaccagcctgagaacatacggcctaatcggcatgtagccaacttagtggagaagctcagggaggtcaagttgagcccagaggggcagaaagttgatcattgtgcacgccatggagagaaacttctactcttctgtcaggaggacgggaaggtcatttgctggctttgtgagcggtctcaggagcaccgtggtcaccacacgttccccacagaggaggttgcccaggagtaccaagtgaagctccaggcagctctggagatgctgaggcagaagcagcaggaagctgaagagttggaagctgacatcagagaagagaaagcttcctggaagactcaaatacagtatgacaaaaccaacgtcttggcagattttgagcaactgagagacatcctggactgggaggagagcaatgagctgcaaaacctggagaaggaggaggaagacattctgaaaagccttacgaactctgaaactgagatggtgcagcagacccagtccctgagagagctcatctcagatctggagcatcggctgcaggggtcagtgatggagctgcttcagggtgtggatggcgtcataaaaaggacggagaacgtgaccttgaagaagccagaaacttttccaaaaaatcaaaggagagtgtttcgagctcctgatctgaaaggaatgctagaagtgtttagagagctgacagatgtccgacgctactgggttgatgtgacagtggctccaaacaacatttcatgtgctgtcatttctgaagataagagacaagtgagctctccgaaaccacagataatatatggggcacgagggacaagataccagacatttgtgaatttcaattattgtactggcatcctgggctctcaaagtatcacatcagggaaacattactgggaggtagacgtgtccaagaaaactgcttggatcctgggggtatgtgctggcttccaacctgatgcaatgtgtaatattgaaaaaaatgaaaattatcaacctaaatacggctactgggttatagggttagaggaaggagttaaatgtagtgctttccaggatagttccttccatactccttctgttcctttcattgtgcccctctctgtgattatttgtcctgatcgtgttggagttttcctagactatgaggcttgcactgtctcattcttcaatatcacaaaccatggatttctcatctataagttttctcactgttctttttctcagcctgtatttccatatttaaatcctagaaaatgtggagtccccatgactctgtgctcaccaagctcttgaaccttcttacacactcagccccttctgtacagcacctcttgtccaggtgcatctcatacacctgaactcatttgcatcattttaaccatcttttccttgctgtctcccttctttctatttgaacgtccttcactcatcagtaaaatgtaataattgccttgtgccatattgtccccaatattttattgacatttgatagcaatttttttcatcattttccgtactcctaaggaaaactgacctatacctcataaaatgagaccgctatttaggtattacttctgccagatatttatcacccaattgcctctgacactgactaagaagatgaagaaaagcttttcaacagcctttctatatcatcgtgtgataattgttcaccaatgaatgagtccttagccctgtgtcagtttaccctcgatgcccttatttgtgagttaaagagaaaatatcataaatggtatactcttaagtatagaggttttgtatctagaggatctcagttcaactcctgtctctccatataccagcagtgtaactgtgaataacatacttaaatggctgtgcttatttccttttcttttcttttttctttttttttttttttgagatgaagttttgctcttgttccccaggctggagtgcaatggcacgatctcggttcactgcaacctccacctctcagattcaagcaattctcctgcctcagcctcccaagtagctgggattacaggtgcccaccaccacccctggctaaatttgtattttcagtagagacggggtttccccatgttggttaggctcgtctagaacctctgacctcaggtgatccacccgcctcggcctcccaaagtgctgggattacaggcgtgagccacggcgcccagcctgtgcttattttcttaaaataatttttgtattaaaaacttcacattaaataagtgctaatgttttattgcatagtagggtgactagagttaacaataacctattgcatatattttgaaatagctagaagagaggattttgaaagttctcaacacaaagaaacgacacatatttgaggtgatggatatgctaattaccctggttcggttattacgcaatgtatacatgtatcaaaacatcacactgtaccacataaatatgtatatttattatttgtcaattaaaagcaaaataaaacaaaaaaccttcatctaatactttggatcattgtgaaaaaataaattcctgaagtataaagcatct

SEQ ID NO: 2319 - protein, 493 aa, Homo sapien
MASGILVNVKEEVTCPICLELLTQPLSLDCGHSFCQACLTANHKKSMLDKGESSCPVCRISYQPENIRPNRHVANLVEKLREVKLSPEGQKVDHCARHGEKLLLFCQEDGKVICWLCERSQEHRGHHTFPTEEVAQEYQVKLQAALEMLRQKQQEAEELEADIREEKASWKTQIQYDKTNVLADFEQLRDILDWEESNELQNLEKEEEDILKSLTNSETEMVQQTQSLRELISDLEHRLQGSVMELLQGVDGVIKRTENVTLKKPETFPKNQRRVFRAPDLKGMLEVFRELTDVRRYWVDVTVAPNNISCAVISEDKRQVSSPKPQIIYGARGTRYQTFVNFNYCTGILGSQSITSGKHYWEVDVSKKTAWILGVCAGFQPDAMCNIEKNENYQPKYGYWVIGLEEGVKCSAFQDSSFHTPSVPFIVPLSVIICPDRVGVFLDYEACTVSFFNITNHGFLIYKFSHCSFSQPVFPYLNPRKCGVPMTLCSPSS

SEQ ID NO: 2320 - DNA, 5785 bp, Homo sapien
atctctatccttcttctggtccttcctagaaaatcaggtggagatgatagtggcttgcatgatggtggtagagctggaggtgcagggcaaaggtcagattctgaatatattttgaaagtaaaggcaacaagatttcctgacagattgattatggtgtgtcaaagaaagagaggaatgcaggatgattccagtgtttttgttgacaactataagtctggagctgccaactggatgcagaagttcactggagggcccagcctggggaaaggatcaggagcaggttaggcatgttaagcttgagatgtctgttaaacatccagataggaatgtcaaagatgcacttgtgtttaagagtcaggaatgcaagagggaattttaggctagaaacaaaaagttagaaattattcgatacagatggtatttaaagctgtgtgactgactgacatgacagaagtggcgagaatagactgagaagtccaaggaatgagccttggaccactccagtgttaggtaagtagttgaaaaaaagagagagagagaaggcatcaaaggagactgaggaagagtgatcaggaaagcataggaaaatccgagaaacatatggtgtcctggaatctatatgaaaaagatatattcagaaagacagagtgataaatctgtcaaattattgaatttgtcaggtaaaataagaacagagaattgatctttggacttagcaaagcagagattatcagtgacttttataaaaatagtttcggtagtgtggaaagatcaaacttctgtttagagtgggtttcagagagaacaacaggaattgaagaagtaataaactttgccaaccagtttagctccaaaggaaaagagggaaatatgatggtagctggcaggggaagtgtggtcaagagaggttttttgtttgtttttcaagatggaagaaataacagtatgtatgtaagctcacaggagggatccagcaggcatggggaaattgatgatataggacagaaagggaagaatggctccttgtgaaagtgaaaggggatgggatctacaggatgaacatgcaaacaaagactggctgcaaagagaggcatgaatagttcatttacagaaacagcaaaggcagagtgttggtacagatgctggtaagtggaaaaatatcatggtaggaggttatggagttccattctaaacacttcaacttcatcagtgaaataagcacggtaatttagcagaatgtgaagatgtaaaagaacagaatttgagaaaacagacgatatgaaataattattagaaaagcagagactgaagaaactgtcatctccttatgtgctaatgagtttaataatgtcctccagtcaccacaagccttctttcaaactacacaattccaactgcttccgtctcagagtatcttgaaataatgatctgaccgcctgttagaccagtgaagggaaggaatttgggttgatttaagaagagaatcctcatggtcatggtagactgatatggagagaaaacattttgaggaaaaatactcaactaaattcatttctactccagcatgcagtttcaagtcaagttccaccttagctccaggtggcaggcagagcaggatgcagaggcacagcacaagtaagggatccaatgactgagtcaagaattacataacctggccagacagctggtacatgggaaagtgctaagagggcaccaacagcgttcctcctccccaaggagcataatgtgatggttcctgccggccctggctgactctcgccgtccttggagataattgggttcagtgccacctggaccagaactggggatgcggaagcaacctgccagacacgcgcgaggttcgaggctgagatggatcttgaggcggcaaagaacggaacagcctggcgccccacgagcgcggagggcgactttgaactgggcatcagcagcaaacaaaaaaggaaaaaaacgaagacagtgaaaatgattggagtattaacattgtttcgatactccgattggcaggataaattgtttatgtcgctgggtaccatcatggccatagctcacggatcaggtctccccctcatgatgatagtatttggagagatgactgacaaatttgttgatactgcaggaaacttctcctttccagtgaacttttccttgtcgctgctaaatccaggcaaaattctggaagaagaaatgactagatatgcatattactactcaggattgggtgctggagttcttgttgctgcctatatacaagtttcattttggactttggcagctggtcgacagatcaggaaaattaggcagaagttttttcatgctattctacgacaggaaataggatggtttgacatcaatgacaccactgaactcaatacgcggctaacagatgacatctccaaaatcagtgaaggaattggtgacaaggttggaatgttctttcaagcagtagccacgttttttgcaggattcatagtgggattcatcagaggatggaagctcacccttgtgataatggccatcagccctattctaggactctctgcagccgtttgggcaaagatactctcggcatttagtgacaaagaactagctgcttatgcaaaagcaggcgccgtggcagaagaggctctgggggccatcaggactgtgatagctttcgggggccagaacaaagagctggaaaggtatcagaaacatttagaaaatgccaaagagattggaattaaaaaagctatttcagcaaacatttccatgggtattgccttcctgttaatatatgcatcatatgcactggccttctggtatggatccactctagtcatatcaaaagaatatactattggaaatgcaatgacagtttttttttcaatcctaattggagctttcagtgttggccaggctgccccatgtattgatgcttttgccaatgcaagaggagcagcatatgtgatctttgatattattgataataatcctaaaattgacagtttttcagagagaggacacaaaccagacagcatcaaagggaatttggagttcaatgatgttcacttttcttacccttctcgagctaacgtcaagatcttgaagggcctcaacctgaaggtgcagagtgggcagacggtggccctggttggaagtagtggctgtgggaagagcacaacggtccagctgatacagaggctctatgaccctgatgagggcacaattaacattgatgggcaggatattaggaactttaatgtaaactatctgagggaaatcattggtgtggtgagtcaggagccggtgctgttttccaccacaattgctgaaaatatttgttatggccgtggaaatgtaaccatggatgagataaagaaagctgtcaaagaggccaacgcctatgagtttatcatgaaattaccacagaaatttgacaccctggttggagagagaggggcccagctgagtggtgggcagaagcagaggatcgccattgcacgtgccctggttcgcaaccccaagatccttctgctggatgaggccacgtcagcattggacacagaaagtgaagctgaggtacaggcagctctggataaggccagagaaggccggaccaccattgtgatagcacaccgactgtctacggtccgaaatgcagatgtcatcgctgggtttgaggatggagtaattgtggagcaaggaagccacagcgaactgatgaagaaggaaggggtgtacttcaaacttgtcaacatgcagacatcaggaagccagatccagtcagaagaatttgaactaaatgatgaaaaggctgccactagaatggccccaaatggctggaaatctcgcctatttaggcattctactcagaaaaaccttaaaaattcacaaatgtgtcagaagagccttgatgtggaaaccgatggacttgaagcaaatgtgccaccagtgtcctttctgaaggtcctgaaactgaataaaacagaatggccctactttgtcgtgggaacagtatgtgccattgccaatggggggcttcagccggcattttcagtcatattctcagagatcatagcgatttttggaccaggcgatgatgcagtgaagcagcagaagtgcaacatattctctttgattttcttatttctgggaattatttctttttttactttcttccttcagggtttcacgtttgggaaagctggcgagatcctcaccagaagactgcggtcaatggcttttaaagcaatgctaagacaggacatgagctggtttgatgaccataaaaacagtactggtgcactttctacaagacttgccacagatgctgcccaagtccaaggagccacaggaaccaggttggctttaattgcacagaatatagctaaccttggaactggtattatcatatcatttatctacggttggcagttaaccctattgctattagcagttgttccaattattgctgtgtcaggaattgttgaaatgaaattgttggctggaaatgccaaaagagataaaaaagaactggaagctgctggaaagattgcaacagaggcaatagaaaatattaggacagttgtgtctttgacccaggaaagaaaatttgaatcaatgtatgttgaaaaattgtatggaccttacaggaattctgtgcagaaggcacacatctatggaattacttttagtatctcacaagcatttatgtatttttcctatgccggttgttttcgatttggtgcatatctcattgtgaatggacatatgcgcttcagagatgttattctggtgttttctgcaattgtatttggtgcagtggctctaggacatgccagttcatttgctccagactatgctaaagctaagctgtctgcagcccacttattcatgctgtttgaaagacaacctctgattgacagctacagtgaagaggggctgaagcctgataaatttgaaggaaatataacatttaatgaagtcgtgttcaactatcccacccgagcaaacgtgccagtgcttcaggggctgagcctggaggtgaagaaaggccagacactagccctggtgggcagcagtggctgtgggaagagcacggtggtccagctcctggagcggttctacgaccccttggcggggacagtgtttgtggactttggttttcagcttctcgatggtcaagaagcaaagaaactcaatgtccagtggctcagagctcaactcggaatcgtgtctcaggagcctatcctatttgactgcagcattgccgagaatattgcctatggagacaacagccgggttgtatcacaggatgaaattgtgagtgcagccaaagctgccaacatacatcctttcatcgagacgttaccccacaaatatgaaacaagagtgggagataaggggactcagctctcaggaggtcaaaaacagaggattgctattgcccgagccctcatcagacaacctcaaatcctcctgttggatgaagctacatcagctctggatactgaaagtgaaaaggttgtccaagaagccctggacaaagccagagaaggccgcacctgcattgtgattgctcaccgcctgtccaccatccagaatgcagacttaatagtggtgtttcagaatgggagagtcaaggagcatggcacgcatcagcagctgctggcacagaaaggcatctatttttcaatggtcagtgtccaggctgggacacagaacttatgaacttttgctacagtatattttaaaaataaattcaaattattctacccatttt

SEQ ID NO: 2321 - protein, 1286 aa, Homo sapien
MDLEAAKNGTAWRPTSAEGDFELGISSKQKRKKTKTVKMIGVLTLFRYSDWQDKLFMSLGTIMAIAHGSGLPLMMIVFGEMTDKFVDTAGNFSFPVNFSLSLLNPGKILEEEMTRYAYYYSGLGAGVLVAAYIQVSFWTLAAGRQIRKIRQKFFHAILRQEIGWFDINDTTELNTRLTDDISKISEGIGDKVGMFFQAVATFFAGFIVGFIRGWKLTLVIMAISPILGLSAAVWAKILSAFSDKELAAYAKAGAVAEEALGAIRTVIAFGGQNKELERYQKHLENAKEIGIKKAISANISMGIAFLLIYASYALAFWYGSTLVISKEYTIGNAMTVFFSILIGAFSVGQAAPCIDAFANARGAAYVIFDIIDNNPKIDSFSERGHKPDSIKGNLEFNDVHFSYPSRANVKILKGLNLKVQSGQTVALVGSSGCGKSTTVQLIQRLYDPDEGTINIDGQDIRNFNVNYLREIIGVVSQEPVLFSTTIAENICYGRGNVTMDEIKKAVKEANAYEFIMKLPQKFDTLVGERGAQLSGGQKQRIAIARALVRNPKILLLDEATSALDTESEAEVQAALDKAREGRTTIVIAHRLSTVRNADVIAGFEDGVIVEQGSHSELMKKEGVYFKLVNMQTSGSQIQSEEFELNDEKAATRMAPNGWKSRLFRHSTQKNLKNSQMCQKSLDVETDGLEANVPPVSFLKVLKLNKTEWPYFVVGTVCAIANGGLQPAFSVIFSEIIAIFGPGDDAVKQQKCNIFSLIFLFLGIISFFTFFLQGFTFGKAGEILTRRLRSMAFKAMLRQDMSWFDDHKNSTGALSTRLATDAAQVQGATGTRLALIAQNIANLGTGIIISFIYGWQLTLLLLAVVPIIAVSGIVEMKLLAGNAKRDKKELEAAGKIATEAIENIRTVVSLTQERKFESMYVEKLYGPYRNSVQKAHIYGITFSISQAFMYFSYAGCFRFGAYLIVNGHMRFRDVILVFSAIVFGAVALGHASSFAPDYAKAKLSAAHLFMLFERQPLIDSYSEEGLKPDKFEGNITFNEVVFNYPTRANVPVLQGLSLEVKKGQTLALVGSSGCGKSTVVQLLERFYDPLAGTVFVDFGFQLLDGQEAKKLNVQWLRAQLGIVSQEPILFDCSIAENIAYGDNSRVVSQDEIVSAAKAANIHPFIETLPHKYETRVGDKGTQLSGGQKQRIAIARALIRQPQILLLDEATSALDTESEKVVQEALDKAREGRTCIVIAHRLSTIQNADLIVVFQNGRVKEHGTHQQLLAQKGIYFSMVSVQAGTQNL

SEQ ID NO: 2322 - DNA, 2176 bp, Homo sapien
tctctctgtcacctcacccttccctgtgccacatgggccctctctctcctgccaggacgctgcggctctggggacctcggagcctgggggtggctctgggagtcttcatgaccattggctttgcactccagctcttgggagggcccttccagaggaggctacctgggctacagctccgacagccctcggccccatccctacgaccagcccttccgtcctgcccaccccggcagcgactggtgttcctgaagacacataaatccgggagcagctctgtgctgagcctgcttcaccgctatggggaccagcacgggctgcgcttcgccctccctgcccgctaccagtttggctacccaaagctcttccaggcctctagggtaaaaggctaccgcccacagggtggaggcacccagctccccttccacatcctctgtcaccacttgaggttcaacctgaaagaggtacttcaggtcatgccttctgacagcttctttttttccattgtccgagacccagcggctctggctcgctctgccttctcctactataaatccacctcatcagccttccgcaagtcaccatctttggctgccttcctggccaatcctcgaggcttctacaggcctggggcccgtggggaccactacgctcgcaacttactatggtttgactttggcctgccctttcccccagagaagagggccaagagagggaatattcatccccccagagaccccaaccccccacagctgcaggtcttgccttctggtgctggccctcgagcccaaaccctcaatcccaatgccctcatccatcctgtttccactgttactgatcatcgcagccagatatcaagccctgcctctttcgatttggggtcttcatccttcatccagtggggtctggcatggctggactctgtctttgacctggtcatggtggctgagtacttcgatgagtcattggttctgctggcagatgccctgtgctggggtctagatgacgtggtgggcttcatgcacaatgcccaggctggacataagcagggcctcagcactgtcagcaacagtggactgactgcggaggaccggcagctgactgcacgggcccgagcctggaacaacctggactgggctctctatgtccacttcaaccgcagtctctgggcacggatagagaaatacggccagggccggctgcagacagctgtggccgagctccgggctcgccgagaggccctagcgaaacattgtctggtagggggtgaggcttctgaccccaaatacatcactgatcgccggttccgccccttccagtttgggtcagctaaggttttgggctatatacttcggagaggattgagcccccaagaccaagaggaatgtgagcgcctagctacccctgagctccagtacaaggacaagctggatgccaagcagttcccccctaccgtctcactgcccctcaagacttcaaggccactctccccataaacatcagactacagatttaggtggaagagcagccatgtttgaagggcacatgtgatgagtggggggcagcaagatgccatttctgcatctcccagaagggatgagtctttgtcccgatgcaagccccctcttcgctgggctcccagcagtgcttccctcctccaccctccactcattttgttctttccccccaactttttttttttttgaaacggagtcttgctctgtcccccaggctggagtgcagtggcatgatctcggctcactgcaacctctgcctcccaggttcaagcgattctcctgcctcagcctccagagtagctaggattacagatacgtgccaccatacccggctaatttttatatttttagagacagggattcaacatgttggttaggctggtcttgaactcctcacctcaggtgatccacatgactctgcctcccaaagtgctgccattacaggcgtgagccactaggcctgacctccccttcccctttcctgccccaaggcagatccacatcaccgaagctccctagaggggcaaaagatggagtgagccacaggaagtttggggcgtggtgagttggaatgatacgtccatttctctatgaaatatttgctactagactgttcatttctctctgacatgtttgttgaatgaataaataatttgaaactt

SEQ ID NO: 2323 - protein, 486 aa, Homo sapien
MGPLSPARTLRLWGPRSLGVALGVFMTIGFALQLLGGPFQRRLPGLQLRQPSAPSLRPALPSCPPRQRLVFLKTHKSGSSSVLSLLHRYGDQHGLRFALPARYQFGYPKLFQASRVKGYRPQGGGTQLPFHILCHHLRFNLKEVLQVMPSDSFFFSIVRDPAALARSAFSYYKSTSSAFRKSPSLAAFLANPRGFYRPGARGDHYARNLLWFDFGLPFPPEKRAKRGNIHPPRDPNPPQLQVLPSGAGPRAQTLNPNALIHPVSTVTDHRSQISSPASFDLGSSSFIQWGLAWLDSVFDLVMVAEYFDESLVLLADALCWGLDDVVGFMHNAQAGHKQGLSTVSNSGLTAEDRQLTARARAWNNLDWALYVHFNRSLWARIEKYGQGRLQTAVAELRARREALAKHCLVGGEASDPKYITDRRFRPFQFGSAKVLGYILRRGLSPQDQEECERLATPELQYKDKLDAKQFPPTVSLPLKTSRPLSP

SEQ ID NO: 2324 - DNA, 2530 bp, Homo sapien; identical to SEQ ID NO: 1327

SEQ ID NO: 2325 - protein, 406 aa, Homo sapien; identical to SEQ ID NO: 1328

SEQ ID NO: 2326 - DNA, 1624 bp, Homo sapien
actcagatcgcttcttgttggtatgtgtagcggcagtggccgccggcggagcagtctgagcccgacgatgaggccggggacgggagctgagcgtggaggcctcatgatggggcaccctggcatgcattatgccccaatgggaatgcaccctatgggtcagagagcgaatatgcctcctgtacctcatggaatgatgccgcagatgatgccccctatgggagggccaccaatgggacaaatgcctggaatgatgtcgtcagtaatgcctggaatgatgatgtctcatatgtctcaggcttccatgcagcctgccttaccgctaaactaaacggatattcactctgaagtgggataaatgaagatgtggagtttcatgttcatgtagggcaggttttgccactatagtgagttttggtaccatacttgaaaaaagttggctttcagagggttttggtttccagaattgtgggtaaaggattgaggaccttgtgtacagttggtgaccatataacatttaaactactcccgtagtctcggttgctgatctcttttacaatttatagcaagctcggggaactgagaccactaaaagttttgctaagaatatgagtcagaggcttgaggattatgcatagcagccaggagtaaatagtatggatgtagcagcaggtacagcatctggtgcaaaatcaatgtggactgaacataaatcacctgatggaaggacttactactacaacactgaaaccaaacagtctacctgggagaaaccagatgatcttaaaacacctgctgagcaactcttatctaaatgcccctggaaggaatacaaatcagattctggaaagccttactattataattctcaaacaaaagaatctcgctgggccaaacctaaagaacttgaggatcttgaaggataccagaataccattgttgctggaagtcttattacaaaatcaaacctgcatgcaatgatcaaagctgaagaaagcagtaagcaagaagagtgcaccacaacatcaacagccccagtccctacaacagaaattccgaccacaatgagcaccatggctgctgccgaagcagcagctgctgttgttgcagcagcagcagcggcagcagcagcagcagctgcagccaatgctaatgcttccacttctgcttctaatactgtcagtggaactgttccagttgttcctgagcctgaagttacttccattgttgctactgttgtagataatgagaatacagtaactatttcaactgaggaacaagcacaacttactagtacccctgctattcaggatcaaagtgtggaagtatccagtaatactggagaagaaacatctaagcaagaaactgtagctgattttactcccaaaaaagaagaggaggagagccaaccagcaaagaaaacatacacttggaatacaaaggaagaggcaaagcaagcttttaaagaattattgaaagaaaagcgggtaccatcgaatgcttcatgggagcaggctatgaaaatgattattaatgatccacgatacagtgctttggcaaagttaagtgaaaaaaagcaagcctttaatgcctataaagtccagacagaaaaaaaaaaaaaaaaaaa

SEQ ID NO: 2327 - protein, 322 aa, Homo sapien
MDVAAGTASGAKSMWTEHKSPDGRTYYYNTETKQSTWEKPDDLKTPAEQLLSKCPWKEYKSDSGKPYYYNSQTKESRWAKPKELEDLEGYQNTIVAGSLITKSNLHAMIKAEESSKQEECTTTSTAPVPTTEIPTTMSTMAAAEAAAAVVAAAAAAAAAAAAANANASTSASNTVSGTVPVVPEPEVTSIVATVVDNENTVTISTEEQAQLTSTPAIQDQSVEVSSNTGEETSKQETVADFTPKKEEEESQPAKKTYTWNTKEEAKQAFKELLKEKRVPSNASWEQAMKMIINDPRYSALAKLSEKKQAFNAYKVQTEKKKK

SEQ ID NO: 2328 - DNA, 5857 bp, Homo sapien
cggcgcaggcggcggcgtccgaggagatttaatccagagactgacttcactatagaacccacagttgtatcaatggttggggaaagatagtggcaacaggcaaaggagaaacagctctgacatacaaagaaaatgagtatgctaaagccaagtgggcttaaggcccccaccaagatcctgaagcctggaagcacagctctgaagacacctacggctgttgtagctccagtagaaaaaaccatatccagtgaaaaagcatcaagcactccatcatctgagactcaggaggaatttgtggatgactttcgagttggggagcgagtttgggtgaatggaaataagcctggatttatccagtttcttggagaaacccagtttgcaccaggccagtgggctggaattgttttagatgaacccataggcaagaacgatggttcggtggcaggagttcggtatttccagtgtgaacctttaaagggcatatttacccgaccttcaaagttaacaaggaaggtgcaagcagaagatgaagctaatggcctgcagacaacgcccgcctcccgagctacttcaccgctgtgcacttctacggccagcatggtgtcttcctccccctccaccccttcaaacatccctcagaaaccatcacagccagcagcaaaggaaccttcagctacgcctccgatcagcaaccttacaaaaactgccagtgaatctatctccaacctttcagaggctggctcaatcaagaaaggagaaagagagctcaaaatcggagacagagtattggttggtggcactaaggctggtgtagtccggtttcttggggagaccgactttgccaagggggagtggtgtggcgtggagttagatgagccacttgggaagaatgatggcgctgttgctggaacaaggtattttcagtgtcaacccaaatatggcttgttcgctcctgtccacaaagttaccaagattggcttcccttccactacaccagccaaagccaaggccaacgcagtgaggcgagtgatggcgaccacgtccgccagcctgaagcgcagcccttctgcctcttccctcagctccatgagctcagtggcctcctctgtgagcagcaggcccagtcggacaggactattgactgaaacctcctcccgttacgccaggaagatctccggtaccactgccctccaggaggccctgaaggagaagcagcagcacattgagcagctgctggcggaacgggatctggagagggcggaggtggccaaggccacgagccacgtgggggagatagagcaggagctagctctggcccgggacggacatgaccagcatgtcctggaattggaagccaaaatggaccagctgcgaacaatggtggaagctgctgacagggagaaggtggagcttctcaaccagcttgaagaggagaaaaggaaggttgaggaccttcagttccgggttgaagaagaatcaattaccaaaggtgatcttgagacgcagaccaaactggagcatgcccgcattaaggagcttgaacagagcctgctctttgaaaagaccaaagctgacaaactccagagggagttagaagacactagggtggctacagtttcagaaaagtcacgtataatggaactggagaaagacctagcattgagagtacaggaagtagctgagctccgaagaaggctagagtccaataagcctgctggggatgtggacatgtcactttcccttttgcaagagataagctctttgcaagaaaagttagaagtcacccgtactgaccaccagagagaaataacttctctgaaggagcattttggagcccgggaagaaactcatcagaaggagataaaggctctgtataccgccacggaaaagctttccaaagagaacgagtcattgaaaagcaagctggagcatgccaacaaagagaactcagatgtgatagctctatggaagtccaaactggagactgccatcgcatcccaccagcaggcgatggaagaactgaaggtatctttcagcaaagggcttggaacagagacggcagaatttgctgaactaaaaacacaaatagagaaaatgagactagattaccaacacgaaatagaaaatttgcagaatcaacaagactctgaacgggctgcccatgctaaagagatggaagccttgagggctaaactgatgaaagttattaaagaaaaggaaaacagtctggaagccatcaggtcgaaactggacaaagcagaagaccagcatctcgtagaaatggaagacacgttaaacaaattacaggaagctgaaataaaggtaaaggagctagaggtactgcaagccaaatgcaatgaacaaaccaaggttattgataattttacatcacagctcaaggctactgaagaaaagctcttggatcttgatgcacttcggaaagccagttccgaaggtaaatcggaaatgaagaaacttagacagcagcttgaggcagctgagaaacagattaaacatttagagattgaaaagaatgctgaaagtagcaaggctagtagcattaccagagagctccaggggagagagctaaagcttactaaccttcaggaaaatttgagtgaagtcagtcaagtgaaagagactttggaaaaagaacttcagattttgaaagaaaagtttgctgaagcttcagaggaggcagtctctgttcagagaagtatgcaagaaactgtaaataagttacaccaaaaggaggaacagtttaacatgctgtcttctgacttggagaagctgagagaaaacttagcagatatggaggcaaaatttagagagaaagatgagagagaagagcagctgataaaggcaaaggaaaaactggaaaatgacattgcagaaataatgaagatgtcaggagataactcttctcagctgacaaaaatgaacgatgaattacgtctgaaagaaagagatgtagaagaattacagctaaaacttacaaaggctaatgaaaatgcaagttttctgcaaaaaagtattgaggacatgactgtcaaagctgaacagagccagcaagaagcagctaaaaagcatgaggaagaaaagaaagaattggagaggaaattgtcggacctggaaaagaaaatggaaacaagccacaaccagtgtcaggagctgaaagccaggtatgagagagccacttctgagacaaaaaccaagcatgaagaaatcctacagaacctccagaagacgctgctggacacagaggacaagctgaagggcgcacgggaggagaacagtggcttgctgcaggagctggaggagctgagaaagcaagccgacaaagccaaagctgctcaaacagcggaagatgccatgcagataatggaacagatgaccaaagagaagactgagactctggcctccttggaggacaccaagcaaacaaatgcaaaactacagaatgaattggacacacttaaagaaaacaacttgaaaaatgtggaagagctgaacaaatcaaaagaactcctgactgtagagaatcaaaaaatggaagaatttaggaaagaaatagaaaccctaaagcaggcagcagctcagaagtcccagcagctttcagcgttgcaagaagagaacgttaaacttgctgaggagctggggagaagcagggacgaagtcacaagtcatcaaaagctggaagaagaaagatctgtgctcaataatcagttgttagaaatgaaaaaaagagaatccaagttcataaaagacgcagatgaagagaaagcttccttgcagaaatccatcagtataactagtgccttactcacagaaaaggatgccgagctggagaaactgagaaatgaggtcacagtgctcaggggagaaaacgcctctgccaagtccttgcattcagttgttcagactctagagtctgataaggtgaagctcgagctcaaggtaaagaacttggagcttcaactcaaagaaaacaagaggcagctcagcagctcctcaggtaatacagacactcaggcagacgaggatgaaagagcccaggagagtcagattgatttcctaaattcagtaatagtggaccttcaaaggaagaatcaagacctcaagatgaaggtggagatgatgtcagaagcagccctgaatgggaacggggatgacctaaacaattatgacagtgatgatcaggagaaacagtccaagaagaaacctcgcctcttctgtgacatttgtgactgctttgatctccacgacacagaggattgtcctacccaggcacagatgtcagaggaccctccccattccacacaccatggcagtcggggtgaggaacgcccatactgtgaaatctgtgagatgtttggacactgggccaccaactgcaatgacgacgaaaccttctgatgaagcctccagtggagaactgggcttgctcagacgcactcgcattgacacaacgtaacaccagcattgtgtgtgcagacttcaggagaactcatgttattttttaaccccgtcaacaaatctaggaaaatattttgatcttcaacaaattgccctttagtctccccgtatgagttagaataataaatatttagtaggtgagttttcacctcgaattttgttttcttgatttttacgtttgaagacattgcaccagatgccattacatttattggccccccgaccttgtagaaaaacccctaccctcacaataccttatttaagtaactttaaattatgccgttacttttcatatttgcacctaagatatttccaggctgcatttgtatatttagattttttggttaagctttgacactggaatgagttgaaaaaatgtgccattttgcattttcatctactcatttaaagtattttattcttattcaaagaaatatctgagctctttgcactacctgttatcagtagtgcctttacttcaggcttgataatacttaggtgtgattataaaatcatgaagcaggtaaagggaggggcaagccccaaactgctgtggggacattttataatctatatgctgcacccacttaatctactgtggtgttttgtttattagttttgcataatttcagcttctatatattgtatgtatatattttttaaaaatctatattttgggaaaaaaacatacacaatgtgtctttctttttggacatttacctttttgaaaaagaaaacacttaaaatgatcattaggacataacagactaggccagacatagcatcttgtggctttgcaaccattttcatttgtttgttttccttttatttcttcaccagatttaaataaaaggaggaattttctccaatttttttttccttctctggcaggtatccccagcagtcaattaacaataagccagtataaaacacctaaataaccaatctacaatctcccttcacaagtttttttactgtttttagatgaatgtacgatgagaaattcaacgttaataattctggattttcttatcacaaaaaagaaaatgaaggacctcaaagcacctgaacagtttatcgaccagtttgaatctatttatcttcatttgaatgtcttctagatatgtaaaaagtcataaaatgtatcttccatgctacatgtacaataagaacttctataattgtatatatgcctttgatgtattttcccctcaagattatcaactgtgtgttcgacagtgaatattcaatctggtaccagttgaaatttttggttataaatgtaatacgaattgtttcacaaacagaaaacatgtaaagcagtattaaaatttggccaaacaagtgttctgtatctacttttaataaatggttattcttt

SEQ ID NO: 2329 - protein, 1427 aa, Homo sapien
MSMLKPSGLKAPTKILKPGSTALKTPTAVVAPVEKTISSEKASSTPSSETQEEFVDDFRVGERVWVNGNKPGFIQFLGETQFAPGQWAGIVLDEPIGKNDGSVAGVRYFQCEPLKGIFTRPSKLTRKVQAEDEANGLQTTPASRATSPLCTSTASMVSSSPSTPSNIPQKPSQPAAKEPSATPPISNLTKTASESISNLSEAGSIKKGERELKIGDRVLVGGTKAGVVRFLGETDFAKGEWCGVELDEPLGKNDGAVAGTRYFQCQPKYGLFAPVHKVTKIGFPSTTPAKAKANAVRRVMATTSASLKRSPSASSLSSMSSVASSVSSRPSRTGLLTETSSRYARKISGTTALQEALKEKQQHIEQLLAERDLERAEVAKATSHVGEIEQELALARDGHDQHVLELEAKMDQLRTMVEAADREKVELLNQLEEEKRKVEDLQFRVEEESITKGDLETQTKLEHARIKELEQSLLFEKTKADKLQRELEDTRVATVSEKSRIMELEKDLALRVQEVAELRRRLESNKPAGDVDMSLSLLQEISSLQEKLEVTRTDHQREITSLKEHFGAREETHQKEIKALYTATEKLSKENESLKSKLEHANKENSDVIALWKSKLETAIASHQQAMEELKVSFSKGLGTETAEFAELKTQIEKMRLDYQHEIENLQNQQDSERAAHAKEMEALRAKLMKVIKEKENSLEAIRSKLDKAEDQHLVEMEDTLNKLQEAEIKVKELEVLQAKCNEQTKVIDNFTSQLKATEEKLLDLDALRKASSEGKSEMKKLRQQLEAAEKQIKHLEIEKNAESSKASSITRELQGRELKLTNLQENLSEVSQVKETLEKELQILKEKFAEASEEAVSVQRSMQETVNKLHQKEEQFNMLSSDLEKLRENLADMEAKFREKDEREEQLIKAKEKLENDIAEIMKMSGDNSSQLTKMNDELRLKERDVEELQLKLTKANENASFLQKSIEDMTVKAEQSQQEAAKKHEEEKKELERKLSDLEKKMETSHNQCQELKARYERATSETKTKHEEILQNLQKTLLDTEDKLKGAREENSGLLQELEELRKQADKAKAAQTAEDAMQIMEQMTKEKTETLASLEDTKQTNAKLQNELDTLKENNLKNVEELNKSKELLTVENQKMEEFRKEIETLKQAAAQKSQQLSALQEENVKLAEELGRSRDEVTSHQKLEEERSVLNNQLLEMKKRESKFIKDADEEKASLQKSISITSALLTEKDAELEKLRNEVTVLRGENASAKSLHSVVQTLESDKVKLELKVKNLELQLKENKRQLSSSSGNTDTQADEDERAQESQIDFLNSVIVDLQRKNQDLKMKVEMMSEAALNGNGDDLNNYDSDDQEKQSKKKPRLFCDICDCFDLHDTEDCPTQAQMSEDPPHSTHHGSRGEERPYCEICEMFGHWATNCNDDETF

SEQ ID NO: 2330 - DNA, 4244 bp, Homo sapien
ggtctcaccatggagcggaaagtgcttgcgctccaggcccgaaagaaaaggaccaaggccaagaaggacaaagcccaaaggaaatctgaaactcagcaccgaggctctgctccccactctgagagtgatctaccagagcaggaagaggagattctgggatctgatgatgatgagcaagaagatcctaatgattattgtaaaggaggttatcatcttgtgaaaattggagatctattcaatgggagataccatgtgatccgaaagttaggctggggacacttttcaacagtatggttatcatgggatattcaggggaagaaatttgtggcaatgaaagtagttaaaagtgctgaacattacactgaaacagcactagatgaaatccggttgctgaagtcagttcgcaattcagaccctaatgatccaaatagagaaatggttgttcaactactagatgactttaaaatatcaggagttaatggaacacatatctgcatggtatttgaagttttggggcatcatctgctcaagtggatcatcaaatccaattatcaggggcttccactgccttgtgtcaaaaaaattattcagcaagtgttacagggtcttgattatttacataccaagtgccgtatcatccacactgacattaaaccagagaacatcttattgtcagtgaatgagcagtacattcggaggctggctgcagaagcaacagaatggcagcgatctggagctcctccgccttccggatctgcagtcagtactgctccccagcctaaaccagctgacaaaatgtcaaagaataagaagaagaaattgaagaagaagcagaagcgccaggcagaattactagagaagcgaatgcaggaaattgaggaaatggagaaagagtcgggccctgggcaaaaaagaccaaacaagcaagaagaatcagagagtcctgttgaaagacccttgaaagagaacccacctaataaaatgacccaagaaaaacttgaagagtcaagtaccattggccaggatcaaacgcttatggaacgtgatacagagggtggtgcagcagaaattaattgcaatggagtgattgaagtcattaattatactcagaacagtaataatgaaacattgagacataaagaggatctacataatgctaatgactgtgatgtccaaaatttgaatcaggaatctagtttcctaagctcccaaaatggagacagcagcacatctcaagaaacagactcttgtacacctataacatctgaggtgtcagacaccatggtgtgccagtcttcctcaactgtaggtcagtcattcagtgaacaacacattagccaacttcaagaaagcattcgggcagagataccctgtgaagatgaacaagagcaagaacataacggaccactggacaacaaaggaaaatccacggctggaaattttcttgttaatccccttgagccaaaaaatgcagaaaagctcaaggtgaagattgctgaccttggaaatgcttgttggcacaaacatttcactgaagatattcaaacaaggcaatatcgttccttggaagttctaatcggatctggctataatacccctgctgacatttggagcacggcatgcatggcctttgaactggccacaggtgactatttgtttgaacctcattcaggggaagagtacactcgagatgaagatcacattgcattgatcatagaacttctggggaaggtgcctcgcaagctcattgtggcaggaaaatattccaaggaatttttcaccaaaaaaggtgacctgaaacatatcacgaagctgaaaccttggggcctttttgaggttctagtggagaagtatgagtggtcgcaggaagaggcagctggcttcacagatttcttactgcccatgttggagctgatccctgagaagagagccactgccgccgagtgtctccggcacccttggcttaactcctaagcccctgcccagcaccacagcagagatcacacactgaccctccgcccttccccttcaagcattttcctcttcccttttcagggtgaagctcttccttcaagagtttctagatcttgttttttttttaatccaacatgttcatttgggtttgcttacttgaccctgtggagatccccacagccattgggcatcctaggtgaatttggccttggttgggctctgccaaagactaatggactaaaatgtgaaacagcctcttgccctgtacctttccttcccattaggacatcctttaaattataagcatcctttttgaaaagagctatgaaggtgtatgagcccatccttttattcattgactctaagagtcaaattttctagtgcatatcctattgccagcataaggatgaggagggggaaagggtcttaattctatgtacagcagagacattaaacttgctgtgtccgggctgcatcatcttcctggactgtttctgttgttctctgtgttcacattttttcctgcaacttttaagctactgtcttttttaaatagctatatgaacaccaaatttgggtaccattttatcactgttcaaagcactgtcaaattcctttcatcctttaatagttaagatctttgaatcttcagtctgatttttaatgtaagcaaaaacagaaccattgaatagtaatttcttgagaacctcaggtgttctataaacagtcctttcctgtatgtcttctattaccctaagaccagagttattttggttggttgttttgttttattttttgtttttgtatccatggctggcactttactcattgcacttgagtttattgccccataactaaaggatcaggatgatggtagaacggagatctgggtttcagagctttcccatttaagaaaaatagatcttgagattctgattcttttccaaacagtcccctgctttcatgtacagctttttctttaccttacccaaaattctggccttgaagcagttttcctctatggctttgcctttctgattttctcagaggctcgagtctttaatataaccccaaatgaaagaaccaaggggaggggtgggatggcacttttttttgttggtcttgttttgttttgttttttggttggttggttcgttattttttaagattagccattctctgctgctatttccctacataatgtcaatttttaaccataattttgacatgattgagatgtacttgaggcttttttgttttaattgagaaaagactttgcaattttttttttaggatgagcctctcctagacttgacctagaatattacatattcctccagtaagtaatactgaagagcaaaagagaggcaggattggggtcacagccgcttcttcagcatggaccaagtgggccttggggattgcagcgttctcgaagtggctgtaggactcgaatttacagaaagccacagaggtgcaacttgaggctctgctagcaagccaccagtgaggctattgggtaaccacctttctatacaggagattggaatctactttgtcatttatccaccacagtgacaaaggaaaagtggtgccgttatgcaatccatttaactcataaacatattactctgagtaactggccagccattcatcggatccttcattgggtactcctgaaatcagacatgttcctgtagaaagaattttaagttaggctttctatgcacctatcaagaatcaagagaatagattgtatcaaacaacggcagggaaatccttcagcaattctaatccactttgggttttcagctgtttttacatctaaagcaatagactagaactgaattatcttctacatagtaaaatcacaattgtggaattacaggaattctggtgatattaaggtgaaataacaaaacacaaaaggccctattttaacagttgatgtgacagtaagttttaatagaacctgtaacttcattttggaaatgcttctccaccaaataagggctttttcccctatttaaggagccagatggattgaaagatgtggaaataggcagctgtagatcttgatcttccaggtaccccatgtacctttattgagcttaattataatactgtcaaattgccacgatctcactaaaggatttctatttgctgtcagttaaaaataaagccctaaatacatttttattctttctactgagggcattgtctgttttctttgtaaatgccgtacaataaacaaattatttaataaccta

SEQ ID NO: 2331 - protein, 654 aa, Homo sapien
MERKVLALQARKKRTKAKKDKAQRKSETQHRGSAPHSESDLPEQEEEILGSDDDEQEDPNDYCKGGYHLVKIGDLFNGRYHVIRKLGWGHFSTVWLSWDIQGKKFVAMKVVKSAEHYTETALDEIRLLKSVRNSDPNDPNREMVVQLLDDFKISGVNGTHICMVFEVLGHHLLKWIIKSNYQGLPLPCVKKIIQQVLQGLDYLHTKCRIIHTDIKPENILLSVNEQYIRRLAAEATEWQRSGAPPPSGSAVSTAPQPKPADKMSKNKKKKLKKKQKRQAELLEKRMQEIEEMEKESGPGQKRPNKQEESESPVERPLKENPPNKMTQEKLEESSTIGQDQTLMERDTEGGAAEINCNGVIEVINYTQNSNNETLRHKEDLHNANDCDVQNLNQESSFLSSQNGDSSTSQETDSCTPITSEVSDTMVCQSSSTVGQSFSEQHISQLQESIRAEIPCEDEQEQEHNGPLDNKGKSTAGNFLVNPLEPKNAEKLKVKIADLGNACWHKHFTEDIQTRQYRSLEVLIGSGYNTPADIWSTACMAFELATGDYLFEPHSGEEYTRDEDHIALIIELLGKVPRKLIVAGKYSKEFFTKKGDLKHITKLKPWGLFEVLVEKYEWSQEEAAGFTDFLLPMLELIPEKRATAAECLRHPWLNS

SEQ ID NO: 2332 - DNA, 2036 bp, Homo sapien
tttcctctttctctaagagtctctctctccctttccctctctctccccccaatctgtctttctagcatgttgccctttttcaaccacatttgtgtttcaggtgtagagaggagagagagtgaacagggagcggggcttttgtctgttggtctccctggactgaagagagggagaatagaagcccaagactaagattctcaaaatggtttattacccagaactctttgtctgggtcagtcaagaaccatttccaaacaaggacatggagggaaggcttcctaagggaagacttcctgtcccaaaggaagtgaaccgcaagaagaacgatgagacaaacgctgcctccctgactccactgggcagcagtgaactccgctccccaagaatcagttacctccactttttttaatcgtaacacctccatttgtattacatatggtgtatgggtattgatgaggtcatggtatcatatatgggatttttttctgtgtaaatcatcaagtataagaagaaactatgggactctgagccttgctttagagaatttacagtggacaaataggtgtcatcaaaccagtttttaatcattctgactcaagtgaaaacgctcagaatttcacactgtgaatccacgtttacaacccttacaggtgggccttcaggcctggttcgctacaacaatgtcttccacaactcaaactcccaccgcgctcacacaaccggtccactcctgccttttcactcacacagctcccgactgcttcttgcagaggctgagagtccccccccccacctttttttttcatttagatgtaacaaacctagtagtttatgttcatcaattgtctgtatatctctatattttatccatgtactcttttgatgtatagaagtagtttgaaactcattgtttccttgtggtaagtgaccgagatgctgccacaggacctgagacactgatgaatggtgctattttggactttcaacatgctccttggcgaggtagctctgatggagttattttttatttccatgttctaagaaggtgttggtactctgtttccctgaatgttgttctctagactggattgacttgttttccttgtgtcttcagtgtggctttcttcctcagtgttgtaggttgagcgaatgctaccagagtgtgagagaccattgtctcgttggctggcgctcacggacatgcagtcacggtagcgggagcaatcacaaaactgtaatttacttaccaaatctcttcctttccgtagcctcgcctgcctgacttagagaaagaaaagcaataattttacaggcattttgaggtgtctctttgggttctttctgtttgaaaggatatttgtcgaaaaaaagagcaaaaccgttttaaataaactccccctggaaaaaaacccaaaacactggcatctgagtaggaatatgaaaatgacaccttttccaaatattaaattggaaaacaaggtctacaaaatcatgatacttttttaaaaggcagagcattcttttttcggcaattttgataagcaaggtgtagatttacatttttgtccttgctcccaacgaaatggataaacaaaaataaattaccatctactcatggaatgttgttgtgttagccagtctgaaagcccaccttaatttttatataactgtctttagctcttcttttgacagggcaggccttgttctgaactgtttcgcttctgactgttaaacaccgatgacgcatgcactgcacttcttcgttttcttcttgctcccccattggcctgagtttcttgtgcattactcctctccctccttcgttagaataggtatatcagctgtgtaaatagagcaagaaaacagtattctgcatctgtggcatttatgtagagttgcagttgtgtactgctgaaaatgcaggcttttgtaacagtgtgatctttactgatgcactcatgacaagtacccaatgtattttagctattttagtagtatttgttcaataaatacgcaagctgtaaggtaactgtctg

SEQ ID NO: 2333 - protein, 68 aa, Homo sapien
MVYYPELFVWVSQEPFPNKDMEGRLPKGRLPVPKEVNRKKNDETNAASLTPLGSSELRSPRISYLHFF

SEQ ID NO: 2334 - DNA, 2024 bp, Homo sapien
aaattcttattcttagtgagagactgtagttaaaaggaaggcttttagaacttgggttcaaggaagatggagatgcgtcggaagctctttggcgggggtgaggaagttcagaaagtgtgcattttccttctggcatttaggtcttgtccgtgtgatttggtggtgcttgggtcataagcctgattaaaattcagggacatgtaccacggcggccaaagcggaattaatttttttatatggggactggagcgctgaaaagttgttcctgaccaggctctaatgagaaattcctctctccccaggttatgaagacagtatggagtttccagaccatagtagacatttgctacagtgtctgagcgagcagagacaccagggttttctttgtgactgcactgttctggtgggagatgcccagttccgagcgcaccgagctgtactggcttcatgcagcatgtatttccacctcttttacaaggaccagctggacaaaagagacattgttcatctgaacagcgacattgttacagcccccgctttcgctctcctgcttgaattcatgtatgaagggaaactccagttcaaagacttgcccattgaagacgtgctagcagctgccagttatctccacatgtatgacattgtcaaagtctgcaaaaagaagctgaaagagaaagccaccacggaggcagacagcaccaaaaaggaagaagatgcttcaagttgttcggacaaagtcgagagtctctccgatggcagcagccacatagcaggcgatttgcccagtgatgaagatgaaggagaagatgaaaaattgaacatcctgcccagcaaaagggacttggcggccgagcctgggaacatgtggatgcgattgccctcagactcagcaggcatcccccaggctggcggagaggcagagccacacgccacagcagctggaaaaacagtagccagcccctgcagctcaacagagtctttgtcccagaggtctgtcacctccgtgagggattcggcagatgttgactgtgtgctggacctgtctgtcaagtccagcctttcaggagttgaaaatctgaacagctcttatttctcttcacaggacgtgctgagaagcaacctggtgcaggtgaaggtggagaaagaggcttcctgtgatgagagtgatgttggcactaatgactatgacatggaacatagcactgtgaaagaaagtgtgagcactaataacagggtacagtatgagccggcccatctggctcccctgagggaggactcggtcttgagggagctggaccgggaggacaaagccagtgatgatgagatgatgaccccagagagcgagcgtgtccaggtggagggaggcatggagagcagtctgctcccctacgtctccaacatcctgagccccgcgggccagatcttcatgtgccccctgtgcaacaaggtcttccccagcccccacatcctgcagatccacctgagcacgcacttccgcgagcaggacggcatccgcagcaagcccgccgccgatgtcaacgtgcccacgtgctcgctgtgtgggaagactttctcttgcatgtacaccctcaagcgccacgagaggactcactcgggggagaagccctacacatgcacccagtgcggcaagagcttccagtactcgcacaacctgagccgccatgccgtggtgcacacccgcgagaagccgcacgcctgcaagtggtgcgagcgcaggttcacgcagtccggggacctgtacagacacattcgcaagttccactgtgagttggtgaactccttgtcggtcaaaagcgaagcactgagcttgcctactgtcagagactggaccttagaagatagctctcaagaactttggaaataattttatatatatataaataatatatatatatatacatatatataaatagatctctatatagttgtggtacggtctaaaagcagtcttgtttcctggaaataaaaagttgggatattaacttgtttttgcactttagaat

SEQ ID NO: 2335 - protein, 522 aa, Homo sapien; identical to SEQ ID NO: 1007

SEQ ID NO: 2336 - DNA, 4552 bp, Homo sapien
agcgcccgccgcgtccggggccggctggtgcgcgagacgccgccgagagttgtgaagggcgcgggtggggggcgctgccggcctcgtgggtacgttcgtgccgcgtctgtcccagagctggggccgcaggagcggaggcaagaggggcactatggcagacaaagttaggaggcagaggccgaggaggcgagtctgttgggccttggtggctgtgctcttggcagacctgttggcactgagtgatacactggcagtgatgtctgtggacctgggcagtgagtccatgaaggtggccattgtcaaacctggagtgcccatggaaattgtcttgaataaggaatctcggaggaaaacaccggtgatcgtgaccctgaaagaaaatgaaagattctttggagacagtgcagcaagcatggcgattaagaatccaaaggctacgctacgttacttccagcacctcctggggaagcaggcagataacccccatgtagctctttaccaggcccgcttcccggagcacgagctgactttcgacccacagaggcagactgtgcactttcagatcagctcgcagctgcagttctcacctgaggaagtgttgggcatggttctcaattattctcgttctctagctgaagattttgcagagcagcccatcaaggatgcagtgatcaccgtgccagtcttcttcaaccaggccgagcgccgagctgtgctgcaggctgctcgtatggctggcctcaaagtgctgcagctcatcaatgacaacaccgccactgccctcagctatggtgtcttccgccggaaagatattaacaccactgcccagaatatcatgttctatgacatgggctcaggcagcaccgtatgcaccattgtgacctaccagatggtgaagactaaggaagctgggatgcagccacagctgcagatccggggagtaggatttgaccgtaccctggggggcctggagatggagctccggcttcgagaacgcctggctgggcttttcaatgagcagcgcaagggtcagagagcaaaggatgtgcgggagaacccgcgtgccatggccaagctgctgcgtgaggctaatcggctcaaaaccgtcctcagtgccaacgctgaccacatggcacagattgaaggcctgatggatgatgtggacttcaaggcaaaagtgactcgtgtggaatttgaggagttgtgtgcagacttgtttgagcgggtgcctgggcctgtacagcaggccctccagagtgccgaaatgagtctggatgagattgagcaggtgatcctggtgggtggggccactcgggtccccagagttcaggaggtgctgctgaaggccgtgggcaaggaggagctggggaagaacatcaatgcagatgaagcagccgccatgggggcagtgtaccaggcagctgcgctcagcaaagcctttaaagtgaagccatttgtcgtccgagatgcagtggtctaccccatcctggtggagttcacgagggaggtggaggaggagcctgggattcacagcctgaagcacaataaacgggtactcttctctcggatggggccctaccctcaacgcaaagtcatcacctttaaccgctacagccatgatttcaacttccacatcaactacggcgacctgggcttcctggggcctgaagatcttcgggtatttggctcccagaatctgaccacagtgaagctaaaaggggtgggtgacagcttcaagaagtatcctgactacgagtccaagggcatcaaggctcacttcaacctggatgagagtggcgtgctcagtctagacagggtggagtctgtatttgagacactggtagaggacagcgcagaagaggaatctactctcaccaaacttggcaacaccatttccagcctgtttggaggcggtaccacaccagatgccaaggagaatggtactgatactgtccaggaggaagaggagagccctgcagaggggagcaaggacgagcctggggagcaggtggagctcaaggaggaagctgaggccccagtggaggatggctctcagcccccaccccctgaacctaagggagatgcaacccctgagggagaaaaggccacagaaaaagaaaatggggacaagtctgaggcccagaaaccaagtgagaaggcagaggcagggcctgagggcgtcgctccagccccagagggagagaagaagcagaagcccgccaggaagcggcgaatggtagaggagatcggggtggagctggttgttctggacctgcctgacttgccagaggataagctggctcagtcggtgcagaaacttcaggacttgacactccgagacctggagaagcaggaacgggaaaaagctgccaacagcttggaagcgttcatatttgagacccaggacaagctgtaccagcccgagtaccaggaagtgtccacagaggagcagcgtgaggagatctctgggaagctcagcgccgcatccacctggctggaggatgagggtgttggagccaccacagtgatgttgaaggagaagctggctgagctgaggaagctgtgccaagggctgttttttcgggtagaggagcgcaagaagtggcccgaacggctgtctgccctcgataatctcctcaaccattccagcatgttcctcaagggggcccggctcatcccagagatggaccagatcttcactgaggtggagatgacaacgttagagaaagtcatcaatgagacctgggcctggaagaatgcaactctggccgagcaggctaagctgcccgccacagagaagcctgtgttgctctcaaaagacattgaagctaagatgatggccctggaccgagaggtgcagtatctgctcaataaggccaagtttaccaagccccggccccggcctaaggacaagaatgggacccgggcagagccacccctcaatgccagtgccagtgaccagggggagaaggtcatccctccagcaggccagactgaagatgcagagcccatttcagaacctgagaaagtagagactggatccgagccaggagacactgagcctttggagttaggaggtcctggagcagaacctgaacagaaagaacaatcgacaggacagaagcggcctttgaagaacgacgaactataacccccacctctgttttccccattcatctccacccccttcccccaccacttctatttatttaacatcgagggttgggggaggggttggtcctgccctcggctggagttcctttctcacccctgtgatttggaggtgtggagaaggggaagggagggacagctcactggttccttctgcagtacctctgtggttaaaaatggaaactgttctcctccccagccccactccctgttccctacccatataggccctaaatttgggaaaaatcactattaatttctgaatcctttgcctgtgggtaggaagagaatggctgccagtggctgatgggtcccggtgatgggaagggtatcaggttgctggggagtttccactcttctctggtgattgttccttccctcccttcctctcccaccatgcgatgagcatcctttcaggccagtgtctgcagagcctcagttaccaggtttggtttctgagtgcctatctgtgctctttcctccctctgcgggcttctcttgctctgagcctcccttccccattcccatgcagctcctttccccctgggtttccttggcttcctgcagcaaattgggcagttctctgccccttgcctaaaagcctgtacctctggattggcggaagtaaatctggaaggattctcactcgtatttcccacccctagtggccagaggagggaggggcacagtgaagaagggagcccaccacctctccgaagaggaaagccacgtagagtggttggcatggggtgccagcatcgtgcaagctctgtcataatctgcatcttcccagcagcctggtaccccaggttcctgtaactccctgcctcctcctctcttctgctgttctgctcctcccagacagagcctttccctcaccccctgaccccctgggctgaccaaaatgtgctttctactgtgagtccctatcccaagatcctggggaaaggagagaccatggtgtgaatgtagagatgccacctccctctctctgaggcaggcctgtggatgaaggaggagggtcagggctggccttcctctgtgcatcactctgctaggttgggggcccccgacccaccatacctacgcctagggagcccgtcctccagtattccgtctgtagcaggagctagggctgctgcctcagctccaagacaagaatgaacctggctgtgtcagtcattttgtcttttcctttttttttttttgccacattggcagagatgggacctaagggtcccacccctcaccccacccccacctcttctgtatgtttgaattctttcagtagctgttgatgctggttggacaggtttgagtcaaattgtactttgctccattgttaattgagaaactgtttcaataaaatattcttttctac

SEQ ID NO: 2337 - protein, 999 aa, Homo sapien
MADKVRRQRPRRRVCWALVAVLLADLLALSDTLAVMSVDLGSESMKVAIVKPGVPMEIVLNKESRRKTPVIVTLKENERFFGDSAASMAIKNPKATLRYFQHLLGKQADNPHVALYQARFPEHELTFDPQRQTVHFQISSQLQFSPEEVLGMVLNYSRSLAEDFAEQPIKDAVITVPVFFNQAERRAVLQAARMAGLKVLQLINDNTATALSYGVFRRKDINTTAQNIMFYDMGSGSTVCTIVTYQMVKTKEAGMQPQLQIRGVGFDRTLGGLEMELRLRERLAGLFNEQRKGQRAKDVRENPRAMAKLLREANRLKTVLSANADHMAQIEGLMDDVDFKAKVTRVEFEELCADLFERVPGPVQQALQSAEMSLDEIEQVILVGGATRVPRVQEVLLKAVGKEELGKNINADEAAAMGAVYQAAALSKAFKVKPFVVRDAVVYPILVEFTREVEEEPGIHSLKHNKRVLFSRMGPYPQRKVITFNRYSHDFNFHINYGDLGFLGPEDLRVFGSQNLTTVKLKGVGDSFKKYPDYESKGIKAHFNLDESGVLSLDRVESVFETLVEDSAEEESTLTKLGNTISSLFGGGTTPDAKENGTDTVQEEEESPAEGSKDEPGEQVELKEEAEAPVEDGSQPPPPEPKGDATPEGEKATEKENGDKSEAQKPSEKAEAGPEGVAPAPEGEKKQKPARKRRMVEEIGVELVVLDLPDLPEDKLAQSVQKLQDLTLRDLEKQEREKAANSLEAFIFETQDKLYQPEYQEVSTEEQREEISGKLSAASTWLEDEGVGATTVMLKEKLAELRKLCQGLFFRVEERKKWPERLSALDNLLNHSSMFLKGARLIPEMDQIFTEVEMTTLEKVINETWAWKNATLAEQAKLPATEKPVLLSKDIEAKMMALDREVQYLLNKAKFTKPRPRPKDKNGTRAEPPLNASASDQGEKVIPPAGQTEDAEPISEPEKVETGSEPGDTEPLELGGPGAEPEQKEQSTGQKRPLKNDEL

SEQ ID NO: 2338 - DNA, 1556 bp, Homo sapien
ccaaattattgtatctcacagtgtggggaaaaggaagagagatcagattgttactgtgtctgtgtagaaagaagtagacataggagactccattttgttatgtactaagaaaaattcttctgccttgagattctgttaatctataaccttaccccccaaccccgtgctctctgaaacatgtgctgtgtcctctcagaattgcctgttttttgtgctcctccgagctcgctgttcgtccgggttttttacgttttaatttccaggacttgaactgccatgtcctctgaagaaggaaagctcttcgtgggagggctcaactttaacaccgacgagcaggcactggaagaccacttcagcagtttcggacctatctctgaggtggtcgttgtcaaggaccgggagactcagcggtccaggggttttggtttcatcaccttcaccaacccagagcatgcttcagttgccatgagagccatgaacggagagtctctggatggtcgtcagatccgtgtggatcatgcaggcaagtctgctcggggaaccagaggaggtggctttggggcccatgggcgtggtcgcagctactctagaggtggtggggaccagggctatgggagtggcaggtattatgacagtcgacctggagggtatggatatggatatggacgttccagagactataatggcagaaaccagggtggttatgaccgctactcaggaggaaattacagagacaattatgacaactgaaatgagacatgcacataatatagatacacaaggaataatttctgatccaggatcgtccttccaaatggctgtatttataaaggtttttggagctgcactgaagcatcttattttatagtatatcaaccttttgtttttaaattgacctgccaaggtagctgaagaccttttagacagttcccatctttttttttaaattttttctgcctatttaaagacaaattatgggacgtttgtagaacctgagtatttttctttttaccagttttttagtttgagctcttaggtttattggagctagcaataattggttctggcaagtttggccagactgacttcaaaaaattaatgtgtatccagggacattttaaaacctgtacacagtgtttattgtggttaggaagcaatttcccaatgtacctataagaaatgtgcatcaagccagcctgaccaacatggtgaaaccccatctgtactaaacataaaaaaattagcctggcatggtggtgtacgcctgtaatcccagtgacttgggaggctgaggcaggagaatcgcttgaacccgggaggcggaggttgcagtgagctaagatcgcgccactgtactccagcctggacaacagcgagagctccatctcaaaaaaaaaaggaaatgtgtatcaagaacatgattatccagcggtattttctaattcagatcatcaaactgattatatagaagagttggctttaaaatgtttgcaaatgtcgatgttgagaatggtatttcttcagttttattttaggatttctatagtttgatgatc

SEQ ID NO: 2339 - protein, 157 aa, Homo sapien
MSSEEGKLFVGGLNFNTDEQALEDHFSSFGPISEVVVVKDRETQRSRGFGFITFTNPEHASVAMRAMNGESLDGRQIRVDHAGKSARGTRGGGFGAHGRGRSYSRGGGDQGYGSGRYYDSRPGGYGYGYGRSRDYNGRNQGGYDRYSGGNYRDNYDN

SEQ ID NO: 2340 - DNA, 1375 bp, Homo sapien
aaaagcaagccaggaggtgcttgcggccgcttctagtagtttccaggcgctgccgggcggctggcactaagcggtcctgaggctgtggctacggctgctccggagctggtggcgccgcgataggagagccgatggccaagtggggtgagggagacccacgctggatcgtggaggagcgggcggacgccaccaacgtcaacaactggcactggacggagagagatgcttcaaattggtccacggataagctgaaaacactgttcttggcagtgcaggttcaaaatgaagaaggcaagtgtgaggtgacggaagtgagtaagcttgatggagaggcatccattaacaatcgcaaagggaaacttatcttcttttatgaatggagcgtcaaactaaactggacaggtacttctaagtcaggagtacagtacaaaggacatgtggagatccccaatttgtctgatgaaaacagcgtggatgaagtggagattagtgtgagccttgccaaagatgagcctgacacaaatctcgtggccttaatgaaggaagaaggggtgaaacttctaagagaagcaatgggaatttacatcagcaccctcaaaacagagttcacccagggcatgatcttacctacaatgaatggagagtcagtagacccagtggggcagccagcactgaaaactgaggagcgcaaggctaagcctgctccttcaaaaacccaggccagacctgttggagtcaaaatccccacttgtaagatcactcttaaggaaaccttcctgacgtcaccagaggagctctatagagtgtttaccacccaagagctggtgcaggcctttacccatgctcctgcaacattagaagcagacagaggtggaaagttccacatggtagatggcaacgtctctggggaatttactgatctggtccctgagaaacatattgtgatgaagtggaggtttaaatcttggccagagggacactttgccaccatcaccttgaccttcatcgacaagaacggagagactgagctgtgcatggaaggtcgaggcatccctgctcctgaggaagagcggacacgacagggctggcagcggtactactttgagggcattaaacagacctttggctatggcgcacgcttattttagggccagcggcaggggactccagcctgctggacacttcagtccagctctctcctgactggggcttgcgactcacaggattgcatcgtcccagctgctaacttggggccggggcccctcccttccacatataccttgggtttgtgcatgttttctgctgggtgggttcagagggcaatttctcttttatgtgtacatatgctaaataaacataatttaaaaaacaaaaa

SEQ ID NO: 2341 - protein, 338 aa, Homo sapien
MAKWGEGDPRWIVEERADATNVNNWHWTERDASNWSTDKLKTLFLAVQVQNEEGKCEVTEVSKLDGEASINNRKGKLIFFYEWSVKLNWTGTSKSGVQYKGHVEIPNLSDENSVDEVEISVSLAKDEPDTNLVALMKEEGVKLLREAMGIYISTLKTEFTQGMILPTMNGESVDPVGQPALKTEERKAKPAPSKTQARPVGVKIPTCKITLKETFLTSPEELYRVFTTQELVQAFTHAPATLEADRGGKFHMVDGNVSGEFTDLVPEKHIVMKWRFKSWPEGHFATITLTFIDKNGETELCMEGRGIPAPEEERTRQGWQRYYFEGIKQTFGYGARLF

SEQ ID NO: 2342 - DNA, 1347 bp, Homo sapien
ggggcctggtgtgattccgtcctgcgcggttgttctctggagcagcgttcttttatctccgtccgccttctctcctacctaagtgcgtgccgccacccgatggaagattcgatggacatggacatgagccccctgaggccccagaactatcttttcggttgtgaactaaaggccgacaaagattatcactttaaggtggataatgatgaaaatgagcaccagttatctttaagaacggtcagtttaggggctggtgcaaaggatgagttgcacattgttgaagcagaggcaatgaattacgaaggcagtccaattaaagtaacactggcaactttgaaaatgtctgtacagccaacggtttcccttgggggctttgaaataacaccaccagtggtcttaaggttgaagtgtggttcagggccagtgcatattagtggacagcacttagtagctgtggaggaagatgcagagtcagaagatgaagaggaggaggatgtgaaactcttaagtatatctggaaagcggtctgcccctggaggtggtagcaaggttccacagaaaaaagtaaaacttgctgctgatgaagatgatgacgatgatgatgaagaggatgatgatgaagatgatgatgatgatgattttgatgatgaggaagctgaagaaaaagcgccagtgaagaaatctatacgagatactccagccaaaaatgcacaaaagtcaaatcagaatggaaaagactcaaaaccatcatcaacaccaagatcaaaaggacaagaatccttcaagaaacaggaaaaaactcctaaaacaccaaaaggacctagttctgtagaagacattaaagcaaaaatgcaagcaagtatagaaaaaggtggttctcttcccaaagtggaagccaaattcatcaattatgtgaagaattgcttccggatgactgaccaagaggctattcaagatctctggcagtggaggaagtctctttaagaaaatagtttaaacaatttgttaaaaaattttccgtcttatttcatttctgtaacagttgatatctggctgtcctttttataatgcagagtgagaactttccctaccgtgtttgataaatgttgtccaggttctattgccaagaatgtgttgtccaaaatgcctgtttagtttttaaagatggaactccaccctttgcttggttttaagtatgtatggaatgttatgataggacatagtagtagcggtggtcagacatggaaatggtggggagacaaaaatacacatgtgaaataaaactcagtattttaataaagtaaaaaaaaaaaaaaccaaaaaaaaaaaaaaaaaaaaaaaaaaaaa

SEQ ID NO: 2343 - protein, 294 aa, Homo sapien
MEDSMDMDMSPLRPQNYLFGCELKADKDYHFKVDNDENEHQLSLRTVSLGAGAKDELHIVEAEAMNYEGSPIKVTLATLKMSVQPTVSLGGFEITPPVVLRLKCGSGPVHISGQHLVAVEEDAESEDEEEEDVKLLSISGKRSAPGGGSKVPQKKVKLAADEDDDDDDEEDDDEDDDDDDFDDEEAEEKAPVKKSIRDTPAKNAQKSNQNGKDSKPSSTPRSKGQESFKKQEKTPKTPKGPSSVEDIKAKMQASIEKGGSLPKVEAKFINYVKNCFRMTDQEAIQDLWQWRKSL

SEQ ID NO: 2344 - DNA, 2264 bp, Homo sapien
ccgccctggaggccggagccactgggcctgcgcgcctcggcagcgagcagccgctttgctcgcgtgcaggaggctgttcgctacctcacacccccggctggcgctgtggcctcgcttagctctaccgtttagcacccggcgacatgcacccggtcggtttccgccaggatgcgggagagttggggcaagctacctgcgacagcttgaacttttcctagggattccgctccacccgccggttagagcgtattgctcattaaatccgagacctgtgtgcttgctactgaaataaaagaagtattttttgccccagagtccttttaggacgttatgacttttctcctttgcaagactgcaaaaaactgacaagaagacaaaactcttcccactcccagggaccgcgttgtcttgagtttggctagtaaaggctagcaagtgaggctttgtctctgcatcccgttccccctaacatcctcagagaaccttcgtttctagaatctttctagtattcagagacttctccagggtcatgatcccaaaggcttaacccgtttacaaggagagagttgtctcctgacgcccaaaatggcagctaaaatggagataactttaagctccaacactgaagcttcctccaagcaagagagacacataatagccaaactagaagagaaacggggccctcctctgcaaaaaaactgcccagatcctgagctctgccgccagagcttcagacgcttttgttatcaagaggtgtctggaccccaagaggcgctctcccagctccgacagctctgccgtcagtggttgcaacccgagctgcacaccaaggagcagattttggagcttctggtgatggagcagttcctgaccatcctgcccccggagatccaggctcgggtcaggcatcgatgtccaatgagcagcaaggagattgtgaccctcgtggaagattttcacagagcatccaagaaaccaaagcagtgggtggccgtttgtatgcaggggcaaaaggtgctcttggagaaaactggatctcagcttggagaacaggaactgccagactttcaaccgcagactcctaggagagatctcagggagagctctccagcagagccttcccaggcaggagcttatgaccggctgagcccccatcattgggagaaatccccactcctccaagaaccaacccccaaattggctgggacagaggcccccagaatgagaagtgacaacaaggaaaatccacaacaggaaggggctaaaggagcaaagccatgtgcagtgtcagctggcagatccaaagggaatggtctgcagaatcctgaaccaagaggggcaaatatgagtgaacctcggttgtcacggaggcaggtcagctccccaaatgctcaaaagccatttgctcactaccagagacattgcagggtggaatacatcagcagccccctaaaaagccacccactgagagagctaaagaaaagcaaaggaggtaaacggagtctgagcaaccgtttgcaacatcttggtcaccagcccacccgctcagcaaagaaaccctacaaatgtgatgactgtgggaaaagcttcacgtggaattcagagctgaagagacacaagagagtccacacaggagagagaccctacacgtgcggagagtgtggaaactgctttgggcggcagtcaaccctgaagctgcaccagaggatccacactggagagaagccataccagtgtggccagtgtgggaaaagctttcgccagagctcaaaccttcaccagcatcaccgacttcaccatggggactaaaaggagcactccatgctttagattcacacggaaggtgtttgtgtttctcctcccccttgcttgcatgtaaatcacaaaaactgtgtgacttacaaggaaagcacgaggcccttgaggaatgatgatgcacattctgctgtgaggaggcccagaaaaggccaaccagggcccaaccgtgcatgatgacagggtgcagagaaggcaggtctgggcactggggcaaagagaacttaagtctctgcagagagcaaggagtaactactgagagagaatcaggacaatcctgcaggtggcccgcttactgttaaatcgtccctctgttgctttatcctctaaaatatgttaagggataaattctatatatatagttatgcatttgctgtcataccagacaattttttatcatgagcacacttctttaataaagatgagtgatctaccagaaaaaaaaaaaa

SEQ ID NO: 2345 - protein, 407 aa, Homo sapien
MAAKMEITLSSNTEASSKQERHIIAKLEEKRGPPLQKNCPDPELCRQSFRRFCYQEVSGPQEALSQLRQLCRQWLQPELHTKEQILELLVMEQFLTILPPEIQARVRHRCPMSSKEIVTLVEDFHRASKKPKQWVAVCMQGQKVLLEKTGSQLGEQELPDFQPQTPRRDLRESSPAEPSQAGAYDRLSPHHWEKSPLLQEPTPKLAGTEAPRMRSDNKENPQQEGAKGAKPCAVSAGRSKGNGLQNPEPRGANMSEPRLSRRQVSSPNAQKPFAHYQRHCRVEYISSPLKSHPLRELKKSKGGKRSLSNRLQHLGHQPTRSAKKPYKCDDCGKSFTWNSELKRHKRVHTGERPYTCGECGNCFGRQSTLKLHQRIHTGEKPYQCGQCGKSFRQSSNLHQHHRLHHGD

SEQ ID NO: 2346 - DNA, 2505 bp, Homo sapien
tttgggttagggagagtgctttcgtttgttttaaatgggagaaactggagcatgttgccaaggcagagagccagcagagaggggtgaatggaagaaggagcgagaagggggttactgacgaagccttatcctggaggagagaaggatggactccagagcccagctttggggactggccttgaataaaaggagggccactctacctcatcctggagggagcacgaacctaaaggcagacccagaagagctttttacaaaactagagaaaattgggaagggctcctttggagaggtgttcaaaggcattgacaatcggactcagaaagtggttgccataaagatcattgatctggaagaagctgaagatgagatagaggacattcaacaagaaatcacagtgctgagtcagtgtgacagtccatatgtaaccaaatattatggatcctatctgaaggatacaaaattatggataataatggaatatcttggtggaggctccgcactagatctattagaacctggcccattagatgaaacccagatcgctactatattaagagaaatactgaaaggactcgattatctccattcggagaagaaaatccacagagacattaaagcggccaacgtcctgctgtctgagcatggcgaggtgaagctggcggactttggcgtggctggccagctgacagacacccagatcaaaaggaacaccttcgtgggcaccccattctggatggcacccgaggtcatcaaacagtcggcctatgactcgaaggcagacatctggtccctgggcataacagctattgaacttgcaagaggggaaccacctcattccgagctgcaccccatgaaagttttattcctcattccaaagaacaacccaccgacgttggaaggaaactacagtaaacccctcaaggagtttgtggaggcctgtttgaataaggagccgagctttagacccactgctaaggagttattgaagcacaagtttatactacgcaatgcaaagaaaacttcctacttgaccgagctcatcgacaggtacaagagatggaaggccgagcagagccatgacgactcgagctccgaggattccgacgcggaaacagatggccaagcctcggggggcagtgattctggggactggatcttcacaatccgagaaaaagatcccaagaatctcgagaatggagctcttcagccatcggacttggacagaaataagatgaaagacatcccaaagaggcctttctctcagtgtttatctacaattatttctcctctgtttgcagagttgaaggagaagagccaggcgtgcggagggaacttggggtccattgaagagctgcgaggggccatctacctagcggaggaggcgtgccctggcatctccgacaccatggtggcccagctcgtgcagcggctccagagatactctctaagtggtggaggaacttcatcccactgaaattcctttggcatttggggttttgtttttccttttttccttcttcatcctcctccttttttaaaagtcaacgagagccttcgctgactccaccgaagaggtgcgccactgggagccaccccagcgccaggcgcccgtccagggacacacacagtcttcactgtgctgcagccagatgaagtctctcagatgggtggggagggtcagctccttccagcgatcattttattttattttattacttttgtttttaattttaaccatagtgcacatattccaggaaagtgtctttaaaaacaaaaacaaaccctgaaatgtatatttgggattatgataaggcaactaaagacatgaaacctcaggtatcctgctttaagttgataactccctctggagcttggagaatcgctctggtggatgggtgtacagatttgtatataatgtcatttttacggaaaccctttcggcgtgcataaggaatcactgtgtacaaactggccaagtgcttctgtagataacgtcagtggagtaaatattcgacaggccataaacttgagtctattgccttgcctttattacatgtacattttgaattctgtgaccagtgatttgggttttattttgtatttgcagggtttgtcattaataattaatgcccctctcttacagaacactcctatttgtacctcaacaaatgcaaattttccccgtttgccctacgccccttttggtacacctagaggttgatttcctttttcatcgatggtactatttcttagtgttttaaattggaacatatcttgcctcatgaagctttaaattataattttcagtttctccccatgaagcgctctcgtctgacatttgtttggaatcgtgccactgctggtctgcgccagatgtaccgtcctttccaatacgattttctgttgcaccttgtagtggattctgcatatcatctttcccacctaaaaatgtctgaatgcttacacaaataaattttataacacgcttaaaaaaaaaaaaaa

SEQ ID NO: 2347 - protein, 431 aa, Homo sapien
MAHSPVQSGLPGMQNLKADPEELFTKLEKIGKGSFGEVFKGIDNRTQKVVAIKIIDLEEAEDEIEDIQQEITVLSQCDSPYVTKYYGSYLKDTKLWIIMEYLGGGSALDLLEPGPLDETQIATILREILKGLDYLHSEKKIHRDIKAANVLLSEHGEVKLADFGVAGQLTDTQIKRNTFVGTPFWMAPEVIKQSAYDSKADIWSLGITAIELARGEPPHSELHPMKVLFLIPKNNPPTLEGNYSKPLKEFVEACLNKEPSFRPTAKELLKHKFILRNAKKTSYLTELIDRYKRWKAEQSHDDSSSEDSDAETDGQASGGSDSGDWIFTIREKDPKNLENGALQPSDLDRNKMKDIPKRPFSQCLSTIISPLFAELKEKSQACGGNLGSIEELRGAIYLAEEVCPGISDTMVAQLVQRLQRYSLSGGGTSSH

SEQ ID NO: 2348 - DNA, 3443 bp, Homo sapien
cgggctccagcggcctcccgcgccgcaacctcctcctcggcgaagtctccctggccgccccatgtcggccgcccccgcctacagcgaagacaagggcggctccgctggccccggggagcccgagtacggccacgaccccgcgagcggcggcatcttctcctccgactacaagcggcatgatgacctgaaggagatgctggacaccaacaaggattctctcaagctggaggccatgaagaggattgtggcgatgattgcccgaggaaagaatgcttcagacctgtttcccgcggtggtgaagaacgtggcctgtaagaacatagaggtgaagaagcttgtctatgtgtacctggtacgctacgctgaggagcagcaagacctggccctgctgtccatctccaccttccaacgtggcctaaaggatcccaaccagctgattcgtgccagtgccctccgtgtcctctctagcatccgtgtgcccatcatagtgcccatcatgatgctagctatcaaggaagccgcctcggacatgtcaccctatgtgcggaaaacagctgcccacgccatccctaaactctacagtttggactctgaccagaaggatcagctgatagaagtcattgagaagcttctggctgacaagaccacgctggtggcgggcagtgtggtgatggcctttgaggaggtctgcccggagcgcatcgacctgattcacaaaaactaccggaaactctgtaacctgctgatcgacgtggaggagtggggccaggtggtcatcatcagcatgctcacccgctacgcccgcacgcagttcctgagccccacccagaacgaatccctactagaggagaacgcggaaaaagccttctacggctcagaggaggacgaggccaagggcgcggggtctgaggagacggccgccgcggccgccccctcccgaaagccctatgtcatggaccccgaccaccggctgctgctgcgcaacaccaaacccctgctgcagagccgcagcgccgcggtggtgatggcggtggcgcagctctacttccacctgggcccaaggcggaagtggcgtcatcgccaaggcgctggtgcgctgctgcgcagccacagtgaggtgcagtacgttgtgctccagaacgtggccaccatgtccatcaagcgccggggtatgtttgagccctacctgaagagcttctacatcaggtccaccgaccccacccagattaagatcctgaagctggaagtgctgaccaacctggccaatgagaccaacattcctactgtcctacgggaattccagacctatattcgcagcatggacaaggactttgtggcagccacaatccaggccattggacgctgtgcaactaacatcggccgagtccgtgacacctgcctcaatggcctggtgcagctgctgtccaaccgtgatgagcttgtggttgcagagtcagtggtcgtcattaagaaattgctacagatgcagccagcacaacatggagagatcatcaaacacttggcaaagcttacagacaacatccaggtgcccatggcccgagccagcatcctgtggctcatcggagagtactgtgagcatgtccccaggattgcacctgatgtcttaagaaaaatggccaagtcattcacagcagaggaggatattgtcaagctgcaggtcatcaacctggcagccaagctctacctgaccaactctaaacagaccaagctgctgacccagtatgtgctgagtctggccaaatatgaccagaactatgatattcgcgaccgggcgcgcttcacccggcagctcatcgtcccttccgagcagggtggggccctcagccgccatgccaagaagctcttcctggcacccaaaccagctccagtcttggagtcatccttcaaagaccgggaccacttccagctgggctcactgtcccacctgcttaatgccaaggccacaggctaccaggagctcccagactggccggaggaagccccagacccatctgtgcgcaacgtggaggtacctgaatggaccaagtgctcaaatcgggagaagagaaaggagaaggaaaaacccttctactcggactctgagggggagtcaggccccacggagtccgcagacagtgaccctgagtctgagagtgaatcggacagtaagagcagcagtgagagcggctctggggagtccagcagtgagtccgacaatgaagaccaggatgaggatgaggagaaagggagaggcagtgagagtgaacagagtgaggaggatggtaagaggaagacaaagaagaaggtgccagagagaaaaggagaagcgtcatcctctgatgagggcagcgattccagcagtagctcatcagagtccgagatgacatcggagtccgaggaggagcagttagaacctgcctcctggagcaggaaaacacctcccagcagcaaaagtgctcctgcaaccaaggagatctccctgcttgatctagaggatttcacccctcccagtgtccagcctgtgtctcccccagcaattgtgtctaccagtctggctgctgacctggagggcctgacactcacagactccaccctggtaccgtcgcttctgagtccagtatcgggtgttgggcggcaggagctgctgcaccgggtagctggcgaggggctggctgtggactacaccttcagccgccaacctttctccggggatccccacatggtgtccgtgcacatccacttctccaacagctctgatacccccatcaagggcctgcatgtgggcactcccaaactgcctgctggcatcagcatccaagaatttcccgaaattgagtccctggcacctggagaatctgccactgctgtaatgggcattaatttctgtgactcaacccaggcagccaacttccagctgtgcacccagacccgacagttctacgtctccattcagccacctgttggggagctgatggcccctgtgttcatgagtgaaaatgagtttaagaaggaacagggaaagctgatgggcatgaatgagatcacagagaaactcatgctgccagacacctgtcggagtgaccacattgtggtgcagaaagtgactgccactgccaacctgggtcgtgttccttgtgggacatctgatgagtacaggtttgcagggaggacactgactggtggaagcctcgttctgctgaccctggatgcccggccagctggagctgcccagctgactgtcaacagcgagaaaatggtgattggcaccatgctggtaaaggatgtgatacaggctctgacccagtgacttccaaatgctgtgacctgtttggctcccatctatacctccccatgacacctaggctgtcagtctctctcatctttctctctctctctcatcatcctcctcatgccagatagcattcagggtgtcctctctcccc

SEQ ID NO: 2349 - protein, 1081 aa, Homo sapien
MSAAPAYSEDKGGSAGPGEPEYGHDPASGGIFSSDYKRHDDLKEMLDTNKDSLKLEAMKRIVAMIARGKNASDLFPAVVKNVACKNIEVKKLVYVYLVRYAEEQQDLALLSISTFQRGLKDPNQLIRASALRVLSSIRVPIIVPIMMLAIKEAASDMSPYVRKTAAHAIPKLYSLDSDQKDQLIEVIEKLLADKTTLVAGSVVMAFEEVCPERIDLIHKNYRKLCNLLIDVEEWGQVVIISMLTRYARTQFLSPTQNESLLEENAEKAFYGSEEDEAKGAGSEETAAAAAPSRKPYVMDPDHRLLLRNTKPLLQSRSAAVVMAVAQLYFHLGPRRKWRHRQGAGALLRSHSEVQYVVLQNVATMSIKRRGMFEPYLKSFYIRSTDPTQIKILKLEVLTNLANETNIPTVLREFQTYIRSMDKDFVAATIQAIGRCATNIGRVRDTCLNGLVQLLSNRDELVVAESVVVIKKLLQMQPAQHGEIIKHLAKLTDNIQVPMARASILWLIGEYCEHVPRIAPDVLRKMAKSFTAEEDIVKLQVINLAAKLYLTNSKQTKLLTQYVLSLAKYDQNYDIRDRARFTRQLIVPSEQGGALSRHAKKLFLAPKPAPVLESSFKDRDHFQLGSLSHLLNAKATGYQELPDWPEEAPDPSVRNVEVPEWTKCSNREKRKEKEKPFYSDSEGESGPTESADSDPESESESDSKSSSESGSGESSSESDNEDQDEDEEKGRGSESEQSEEDGKRKTKKKVPERKGEASSSDEGSDSSSSSSESEMTSESEEEQLEPASWSRKTPPSSKSAPATKEISLLDLEDFTPPSVQPVSPPAIVSTSLAADLEGLTLTDSTLVPSLLSPVSGVGRQELLHRVAGEGLAVDYTFSRQPFSGDPHMVSVHIHFSNSSDTPIKGLHVGTPKLPAGISIQEFPEIESLAPGESATAVMGINFCDSTQAANFQLCTQTRQFYVSIQPPVGELMAPVFMSENEFKKEQGKLMGMNEITEKLMLPDTCRSDHIVVQKVTATANLGRVPCGTSDEYRFAGRTLTGGSLVLLTLDARPAGAAQLTVNSEKMVIGTMLVKDVIQALTQ

SEQ ID NO: 2350 - DNA, 2899 bp, Homo sapien
cagacggcgctgagcgcggcggcggcgggagcggcgtcgagtgtctccgtgcgcccgtctgtggccaagcagccagcagcctagcagccagtcagcttgccgccggcggccaagcagccaaccatgctcaacttcggtgcctctctccagcagactgcggaggaaagaatggaaatgatttctgaaaggccaaaagagagtatgtattcctggaacaaaactgcagagaaaagtgattttgaagctgtagaagcacttatgtcaatgagctgcagttggaagtctgattttaagaaatacgttgaaaacagacctgttacaccagtatctgatttgtcagaggaagagaatctgcttccgggaacacctgattttcatacaatcccagcattttgtttgactccaccttacagtccttctgactttgaaccctctcaagtgtcaaatctgatggcaccagcgccatctactgtacacttcaagtcactctcagatactgccaaacctcacattgccgcacctttcaaagaggaagaaaagagcccagtatctgcccccaaactccccaaagctcaggcaacaagtgtgattcgtcatacagctgatgcccagctatgtaaccaccagacctgcccaatgaaagcagccagcatcctcaactatcagaacaattcttttagaagaagaacccacctaaatgttgaggctgcaagaaagaacataccatgtgccgctgtgtcaccaaacagatccaaatgtgagagaaacacagtggcagatgttgatgagaaagcaagtgctgcactttatgacttttctgtgccttcctcagagacggtcatctgcaggtctcagccagcccctgtgtccccacaacagaagtcagtgttggtctctccacctgcagtatctgcagggggagtgccacctatgccggtcatctgccagatggttccccttcctgccaacaaccctgttgtgacaacagtcgttcccagcactcctcccagccagccaccagccgtttgcccccctgttgtgttcatgggcacacaagtccccaaaggcgctgtcatgtttgtggtaccccagcccgttgtgcagagttcaaagcctccggtggtgagcccgaatggcaccagactctctcccattgcccctgctcctgggttttccccttcagcagcaaaagtcactcctcagattgattcatcaaggataaggagtcacatctgtagccacccaggatgtggcaagacatactttaaaagttcccatctgaaggcccacacgaggacgcacacaggagaaaagcctttcagctgtagctggaaaggttgtgaaaggaggtttgcccgttctgatgaactgtccagacacaggcgaacccacacgggtgagaagaaatttgcgtgccccatgtgtgaccggcggttcatgaggagtgaccatttgaccaagcatgcccggcgccatctatcagccaagaagctaccaaactggcagatggaagtgagcaagctaaatgacattgctctacctccaacccctgctcccacacagtgacagaccggaaagtgaagagtcagaactaactttggtctcagcgggagccagtggtgatgtaaaaatgcttccactgcaagtctgtggccccacaacgtgggcttaaagcagaagccccacagcctggcacgaaggccccgcctgggttaggtgactaaaagggcttcggccacaggcaggtcacagaaaggcaggtttcatttcttatcacataagagagatgagaaagcttttattcctttgaatattttttgaaggtttcagatgaggtcaacacaggtagcacagattttgaatctgtgtgcatatttgttactttacttttgctgtttatacttgagaccaacttttcaatgtgattcttctaaagcactggtttcaagaatatggaggctggaaggaaataaacattacggtacagacatggagatgtaaaatgagtttgtattattacaaatattgtcatctttttctagagttatcttctttattattcctagtctttccagtcaacatcgtggatgtagtgattaaatatatctagaactatcatttttacactattgtgaatatttggaattgaacgactgtatattgctaagagggcccaaagaattggaatcctccttaatttaattgctttgaagcatagctacaatttgtttttgcatttttgttttgaaagtttaacaaatgactgtatctaggcatttcattatgctttgaactttagtttgcctgcagtttcttgtgtagatttgaaaattgtataccaatgtgttttctgtagactctaagatacactgcactttgtttagaaaaaaaactgaagatgaaatatatattgtaaagaagggatattaagaatcttagataacttcttgaaaaagatggcttatgtcatcagtaaagtacctttatgttatgaggatataatgtgtgctttattgaattagaaaattagtgaccattattcacaggtggacaaatgttgtcctgttaatttataggagttttttggggatgtggaggtagttgggtagaaaaattattagaacattcacttttgttaacagtatttctcttttattctgttatatagtggatgatatacacagtggcaaaacaaaagtacattgcttaaaatatatagtgaaaaatgtcactatatcttcccatttaacattgtttttgtatattgggtgtagatttctgacatcaaaacttggacccttggaaaacaaaagttttaattaaaaaaaatccttgtgacttacaatttgcacaatatttcttttgttgtactttatatcttgtttacaataaagaattc

SEQ ID NO: 2351 - protein, 480 aa, Homo sapien
MLNFGASLQQTAEERMEMISERPKESMYSWNKTAEKSDFEAVEALMSMSCSWKSDFKKYVENRPVTPVSDLSEEENLLPGTPDFHTIPAFCLTPPYSPSDFEPSQVSNLMAPAPSTVHFKSLSDTAKPHIAAPFKEEEKSPVSAPKLPKAQATSVIRHTADAQLCNHQTCPMKAASILNYQNNSFRRRTHLNVEAARKNIPCAAVSPNRSKCERNTVADVDEKASAALYDFSVPSSETVICRSQPAPVSPQQKSVLVSPPAVSAGGVPPMPVICQMVPLPANNPVVTTVVPSTPPSQPPAVCPPVVFMGTQVPKGAVMFVVPQPVVQSSKPPVVSPNGTRLSPIAPAPGFSPSAAKVTPQIDSSRIRSHICSHPGCGKTYFKSSHLKAHTRTHTGEKPFSCSWKGCERRFARSDELSRHRRTHTGEKKFACPMCDRRFMRSDHLTKHARRHLSAKKLPNWQMEVSKLNDIALPPTPAPTQ

SEQ ID NO: 2352 - DNA, 2133 bp, Homo sapien
gaactggtggcagtgagagacttcggcggacatggctcccagcgtgccagcggcagaacccgagtatcctaaaggcatccgggccgtgctgctggggcctcccggggccggtaaagggacccaggcacccagattggctgaaaacttctgtgtctgccatttagctactggggacatgctgagggccatggtggcttctggctcagagctaggaaaaaagctgaaggcaactatggatgctgggaaactggtgagtgatgaaatggtagtggagctcattgagaagaatttggagacccccttgtgcaaaaatggttttcttctggatggcttccctcggactgtgaggcaggcagaaatgctcgatgacctcatggagaagaggaaagagaagcttgattctgtgattgaattcagcatcccagactctctgctgatccgaagaatcacaggaaggctgattcaccccaagagtggccgttcctaccacgaggagttcaaccctccaaaagagcccatgaaagatgacatcaccggggaacccttgatccgtcgatcagatgataatgaaaaggccttgaaaatccgcctgcaagcctaccacactcaaaccaccccactcatagagtactacaggaaacgggggatccactccgccatcgatgcatcccagacccccgatgtcgtgttcgcaagcatcctagcagccttctccaaagccacatcctagtatcagaaggccaggcgagactgcaacactgctcatcaccccgcggcgtgatccctgctcttaggtgctgggcagaggggaagggtggtcagggtgaggatggtgagggagggctggtgaggggctcagaggaatacttggaacaacagcagtgttattgtagtgtggcagtttcttttatacataggtgagagtttttaaagtgtaagggaaaaattaattttttaaaaaacaccatgcttggagggtgggggtagaaatagacacaatattatttctaaggaatcgggttttcatttactctggactggtgaaaatattttttaaagccagtgctctaagacctcagcttttatctcagaaccccatgggttccagaccaagagtacaggaaatcaaattgttgtcctgtctgtctatagcttggaacagggagctttgattactgactccggttccacacactgtaagatcaaaaaaccatctccacatttgaaagagatgtaaggtgtattcatagggatggtggctcaacaaatcaagcaaactggaatcaaggggagggggaagggaatgaaatggaaagggaggctgattcccttcccctgacttaccactaatttactaggctacctactttcatgagtaacctctcacagctacccagcacatgccacaatcctatcgtcttgccttcttttatctgcactgtgtgaagggactcttttaaataaatgagcaagtgtcctaagctatgtcatccaaagattgtcctttccattctcaaatcctgtgactgggatcactcaacagcactgtgatgtattattttcaatgaggtgcctttcttaactgaccaaatgctgccttgtttggcccctaaatcaataaaatatgttaaaatttgtatcccctgttgtggcattttttttagataatctaagctagaaaaatgacattgaattctggacctggctggaaggaaaagaagccctttcttgtcgctggcagctgtgtggtaggaggtccaagtatgtgcatatgagataagcctgcaacctcttgaccttcagctcctatgcaggcttctcttgagcccagagacaaggcagcttggtctagtggagatagcactgtgcttggagttcaggggacctaggacaaatcccagccagttagttattcactgtgctcctgtttcctcagctgaaaaaggaagttggttatgccaccttcttggccttaatggcattaaatgaaatttataggaagaaggtttttgctcagtacctggcatgcaacagacattggataaatgttagttggatccagatatacacagaaagatatctgcttcctgccaggctggataactgttgaatgacacttgtccatagtctaga

SEQ ID NO: 2353 - protein, 232 aa, Homo sapien
MAPSVPAAEPEYPKGIRAVLLGPPGAGKGTQAPRLAENFCVCHLATGDMLRAMVASGSELGKKLKATMDAGKLVSDEMVVELIEKNLETPLCKNGFLLDGFPRTVRQAEMLDDLMEKRKEKLDSVIEFSIPDSLLIRRITGRLIHPKSGRSYHEEFNPPKEPMKDDITGEPLIRRSDDNEKALKIRLQAYHTQTTPLIEYYRKRGIHSAIDASQTPDVVFASILAAFSKATS

SEQ ID NO: 2354 - DNA, 3916 bp, Homo sapien
gcttggggccgccatcttggcaagaggcgaagcggcagcggttcctgtcaagggggcagcaggtccagagctgctggtgctcccgttccccagaccctacccctatccccagtggagccggagtgcgggcgcgccccaccaccgccctcaccatggtgctgttggcagcagcggtctgcacaaaagcaggaaaggctattgtttctcgacagtttgtggaaatgacccgaactcggattgagggcttattagcagcttttccaaagctcatgaacactggaaaacaacatacgtttgttgaaacagagagtgtaagatatgtctaccagcctatggagaaactgtatatggtactgatcactaccaaaaacagcaacattttagaagatttggagaccctaaggctcttctcaagagtgatccctgaatattgccgagccttagaagagaatgaaatatctgagcactgttttgatttgatttttgcttttgatgaaattgtcgcactgggataccgggagaatgttaacttggcacagatcagaaccttcacagaaatggattctcatgaggagaaggtgttcagagccgtcagagagactcaagaacgtgaagctaaggctgagatgcgtcgtaaagcaaaggaattacaacaggcccgaagagatgcagagagacagggcaaaaaagcaccaggatttggcggatttggcagctctgcagtatctggaggcagcacagctgccatgatcacagagaccatcattgaaactgataaaccaaaagtggcacctgcaccagccaggccttcaggccccagcaaggctttaaaacttggagccaaaggaaaggaagtagataactttgtggacaaattaaaatctgaaggtgaaaccatcatgtcctctagtatgggcaagcgtacttctgaagcaaccaaaatgcatgctccacccattaatatggaaagtgtacatatgaagattgaagaaaagataacattaacctgtggacgagacggaggattacagaatatggagttgcatggcatgatcatgcttaggatctcagatgacaagtatggccgaattcgtcttcatgtggaaaatgaagataagaaaggggtgcagctacagacccatccaaatgtggataaaaaacttttcactgcagagtctctaattggcctgaagaatccagagaagtcatttccagtcaacagtgacgtaggggtgctaaagtggagactacaaaccacagaggaatcttttattccactgacaattaattgctggccctcggagagtggaaatggctgtgatgtcaacatagaatatgagctacaagaagataatttagaactgaatgatgtggttatcaccatcccactcccgtctggtgtcggcgcgcctgttatcggtgagatcgatggggagtatcgacatgacagtcgacgaaataccctggagtggtgcctgcctgtgattgatgccaaaaataagagtggcagcctggagtttagcattgctgggcagcccaatgacttcttccctgttcaagtttcctttgtctccaagaaaaattactgtaacatacaggttaccaaagtgacccaggtagatggaaacagccccgtcaggttttccacagagaccactttcctagtggataagtatgaaattctgtaataccaagaagagggagctgaaaaggaaaattttcagattaataaagaagacgccaatgatggctgaagagtttttcccagatttacaagccactggagaccccttttttctgatacaatgcacgattctctgcgcgcaaggaccctcgactcacccccatgtttcagtgtcacagagacattctttgataaggaaatggcacaaacataaagggaaaggctgctaattttctttggcagattgtattggccagcaggaaagcaagctctccagagaatgcccccagttaaatacctcctctacctttacctaagttgctcctttatttttattttattattattattattattattattttttgagatggagtctcactttgtaacccaggctggaatgcaatggcatgatctcagctcactgcaacctccgcctcctgggttcaagcaagtctcctgcctcagcctccgagtagctgggactacaggtgcacgccaccacgcctggctaattttttgtattttagtagagacggggtttcaccgtgttgcccaggctggtcgcgaactcctgagctcaggcaatccgcccacctcagcctcccaaagtgttgggattacaggcatgagccaccatgcccagctgctcctttattttaatccctaaatataatccctaaatatagttatatttcatacttagtttgtttttaaaaagttttctctgtagaaaattttaatcattcataccctttacctttaggtttttctttctatacattcagtcaggcactgggatcatctgtttacaggcattatatttatttggcactcctggaacaagtatatctaacccattcttgatttttggactattcaggtgaactatttgaggggtatggggtctagaagttaaaagatacgcatgtcttctgttcttttcccgtatcaattcattccttcatctctttgccaagttgttttcctttcagggcctgtccttccagtttagaacagtaccatgaatcccacttgtgtcaatattaaagatagctgagaagcacctttcaaatggcacagtccctcttcaagatgtctaaaagaatggttatgtctgtccagttagggatttcacatccacatgtaatcatgtctgctgctgttgctacccaaattttcatttctccacattttgggtacttaagctaaaacgtaatggccacagtctgtaatccattcacattcctcagtttcaccacctccctcttccagactgcactctctgtcatcagtcccctcctttctaacagaaatggggttatgattttgaaggctgtgggttcagggagtctttgccaatcctgttggccctaaactatcaaggaggctccatttcaccatttgattttttgcatttcaggaggcaactgattgtttcgatatgtacatattactcacgtataccccatttccttccagtcagcccaacattttccaccagtctgtccccatctctgaaatccttccttctctttccccctaagtcttttgagtgtcatcatgtactggtggtttctcggttccatctcatccatttccttttcaatggagactacagcgtcagccagctcagccttggcttttaactcaatattccagtccataggggtggttaaaagttgctgcaaggctgcaggcactggcagtgggaagaggcagacgactagatgacttctgcacttttagctggttgaaaagtaccactcccactctgaacatctggccgtccctgcaaagagtgtactgtgcttgaagcagagcactcacacataaatggctgtgtgtggaattgcttgccaaagaagtttctagcctttccctttcccctaactgcatcagggaagaattcttatctctagcttggtttccacatgaggtttttctgagaagggcttgggacaagaagtctgtcatgttagttaagcaggcaagaaatcctactaatccagttttgtttgaaagttgtttgtccgtatgattttttaaaagtcaagtttaatttcaaaaaaccttttttttctgagattacttttggggtaatatttaaaatgagagacattttgtaaccctgtaaaatacatagggaatataacattccagtgtatacaaagaaggcaaattctttaatcaaataaagcgtattataaaatgagaaaaaaaaaaaaaaaa

SEQ ID NO: 2355 - protein, 511 aa, Homo sapien
MVLLAAAVCTKAGKAIVSRQFVEMTRTRIEGLLAAFPKLMNTGKQHTFVETESVRYVYQPMEKLYMVLITTKNSNILEDLETLRLFSRVIPEYCRALEENEISEHCFDLIFAFDEIVALGYRENVNLAQIRTFTEMDSHEEKVFRAVRETQEREAKAEMRRKAKELQQARRDAERQGKKAPGFGGFGSSAVSGGSTAAMITETIIETDKPKVAPAPARPSGPSKALKLGAKGKEVDNFVDKLKSEGETIMSSSMGKRTSEATKMHAPPINMESVHMKIEEKITLTCGRDGGLQNMELHGMIMLRISDDKYGRIRLHVENEDKKGVQLQTHPNVDKKLFTAESLIGLKNPEKSFPVNSDVGVLKWRLQTTEESFIPLTINCWPSESGNGCDVNIEYELQEDNLELNDVVITIPLPSGVGAPVIGEIDGEYRHDSRRNTLEWCLPVIDAKNKSGSLEFSIAGQPNDFFPVQVSFVSKKNYCNIQVTKVTQVDGNSPVRFSTETTFLVDKYEIL

SEQ ID NO: 2356 - DNA, 2164 bp, Homo sapien
cttccagctggtgggagttgacgacgtggtgctgggcgttgggaccctactttatctagttcgggaagttgggttgtggggtcatacctgtctgtctgctcccagctttcttgggtttcttccgacggcgtggggcctcgctaaggaattcccggcccctcagggccacggctttagcggtgtcttttgcgagttcttcgtaagtacatcttaaagctgtcaagatggttctagcagaccttggaagaaaaataacatcagcattacgctcattgagcaatgccaccattatcaatgaagaggtattgaatgctatgctaaaagaagtctgtaccgctttgttggaagcagatgttaatattaaactagtgaagcaactaagagaaaatgttaagtctgctattgatcttgaagagatggcatctggtcttaacaaaagaaaaatgattcagcatgctgtatttaaagaacttgtgaagcttgtagaccctggagttaaggcatggacacccactaaaggaaaacaaaatgtgattatgtttgttggattgcaagggagtggtaaaacaacaacatgttcaaagctagcatattattaccagaggaaaggttggaagacctgtttaatatgtgcagacacattcagagcaggggcttttgaccaactaaaacagaatgctaccaaagcaagaattccattttatggaagctatacagaaatggatcctgtcatcattgcttctgaaggagtagagaaatttaaaaatgaaaattttgaaattattattgttgatacaagtggccgccacaaacaagaagactctttgtttgaagaaatgcttcaagttgctaatgctatacaacctgataacattgtttatgtgatggatgcctccattgggcaggcttgtgaagcccaggctaaggcttttaaagataaagtagatgtagcctcagtaatagtgacaaaacttgatggccatgcaaaaggaggtggtgcactcagtgcagtcgctgccacaaaaagtccgattattttcattggtacaggggaacatatagatgactttgaacctttcaaaacacagccttttattagcaaacttcttggtatgggcgacattgaaggactgatagataaagtcaacgagttgaagttggatgacaatgaagcacttatagagaagttgaaacatggtcagtttacgttgcgagacatgtatgagcaatttcaaaatatcatgaaaatgggccccttcagtcagatcttggggatgatccctggttttgggacagattttatgagcaaaggaaatgaacaggagtcaatggcaaggctaaagaaattaatgacaataatggatagtatgaatgatcaagaactagacagtacggatggtgccaaagtttttagtaaacaaccaggaagaatccaaagagtagcaagaggatcgggtgtatcaacaagagatgttcaagaacttttgacacaatataccaagtttgcacagatggtaaaaaagatgggaggtatcaaaggacttttcaaaggtggcgacatgtctaagaatgtgagccagtcacagatggcaaaattgaaccaacaaatggccaaaatgatggatcctagggttcttcatcacatgggtggtatggcaggacttcagtcaatgatgaggcagtttcaacagggtgctgctggcaacatgaaaggcatgatgggattcaataatatgtaaagaaaatgccttaatataaactgactcagttgaatacctaatttgctgagacctcagcgtttcccttctttttgcgaattggggggaaagtgtatttttcttgcttatcatgcactctttccttttcttctcgcccgcttttcccctccttttctttttccttccttctttcctccctttaatataagggagaaatacatggtttttgtggaaatcattatatgtttgctttagattttcttctgttttcaccatcataacacttaagttaaatcatgatgtaaaattttagtacttaaaggtttttaattatctcgaaggccaagcattgcatttgtaaacagtcctggtcagtagttaaataatgtttcaattaaagtgctgtaaaataaacttcaaagtggttataaaaaaaaaaaaaaaaa

SEQ ID NO: 2357 - protein, 504 aa, Homo sapien
MVLADLGRKITSALRSLSNATIINEEVLNAMLKEVCTALLEADVNIKLVKQLRENVKSAIDLEEMASGLNKRKMIQHAVFKELVKLVDPGVKAWTPTKGKQNVIMFVGLQGSGKTTTCSKLAYYYQRKGWKTCLICADTFRAGAFDQLKQNATKARIPFYGSYTEMDPVIIASEGVEKFKNENFEIIIVDTSGRHKQEDSLFEEMLQVANAIQPDNIVYVMDASIGQACEAQAKAFKDKVDVASVIVTKLDGHAKGGGALSAVAATKSPIIFIGTGEHIDDFEPFKTQPFISKLLGMGDIEGLIDKVNELKLDDNEALIEKLKHGQFTLRDMYEQFQNIMKMGPFSQILGMIPGFGTDFMSKGNEQESMARLKKLMTIMDSMNDQELDSTDGAKVFSKQPGRIQRVARGSGVSTRDVQELLTQYTKFAQMVKKMGGIKGLFKGGDMSKNVSQSQMAKLNQQMAKMMDPRVLHHMGGMAGLQSMMRQFQQGAAGNMKGMMGFNNM

SEQ ID NO: 2358 - DNA, 2591 bp, Homo sapien
ctcagactgtccttcctctctggactgtaagaatatgtctccagggccagtgtctgctgcgatcgagtcccaccttccaagtcctggcatctcaatgcatctgggaagctacctgcattaagtcaggactgagcacacaggtgaactccagaaagaagaagctatggccgcagtgattctggagagcatctttctgaagcgatcccaacagaaaaagaaaacatcacctctaaacttcaagaagcgcctgtttctcttgaccgtgcacaaactctcctactatgagtatgactttgaacgtgggagaagaggcagtaagaagggttcaatagatgttgagaagatcacttgtgttgaaacagtggttcctgaaaaaaatcctcctccagaaagacagattccgagaagaggtgaagagtccagtgaaatggagcaaatttcaatcattgaaaggttcccttatcccttccaggttgtatatgatgaagggcctctctacgtcttctccccaactgaagaactaaggaagcggtggattcaccagctcaaaaacgtaatccggtacaacagtgatctggttcagaaatatcacccttgcttctggatcgatgggcagtatctctgctgctctcagacagccaaaaatgctatgggctgccaaattttggagaacaggaatggaagcttaaaacctgggagttctcaccggaagacaaaaaagcctcttcccccaacgcctgaggaggaccagatcttgaaaaagccactaccgcctgagccagcagcagcaccagtctccacaagtgagctgaaaaaggttgtggccctttatgattacatgccaatgaatgcaaatgatctacagctgcggaagggtgatgaatattttatcttggaggaaagcaacttaccatggtggagagcacgagataaaaatgggcaggaaggctacattcctagtaactatgtcactgaagcagaagactccatagaaatgtatgagtggtattccaaacacatgactcggagtcaggctgagcaactgctaaagcaagaggggaaagaaggaggtttcattgtcagagactccagcaaagctggcaaatatacagtgtctgtgtttgctaaatccacaggggaccctcaaggggtgatacgtcattatgttgtgtgttccacacctcagagccagtattacctggctgagaagcaccttttcagcaccatccctgagctcattaactaccatcagcacaactctgcaggactcatatccaggctcaaatatccagtgtctcaacaaaacaagaatgcaccttccactgcaggcctgggatacggatcatgggaaattgatccaaaggacctgaccttcttgaaggagctggggactggacaatttggggtagtgaagtatgggaaatggagaggccagtacgacgtggccatcaagatgatcaaagaaggctccatgtctgaagatgaattcattgaagaagccaaagtcatgatgaatctttcccatgagaagctggtgcagttgtatggcgtctgcaccaagcagcgccccatcttcatcatcactgagtacatggccaatggctgcctcctgaactacctgagggagatgcgccaccgcttccagactcagcagctgctagagatgtgcaaggatgtctgtgaagccatggaatacctggagtcaaagcagttccttcaccgagacctggcagctcgaaactgtttggtaaacgatcaaggagttgttaaagtatctgatttcggcctgtccaggtatgtcctggatgatgaatacacaagctcagtaggctccaaatttccagtccggtggtccccaccggaagtcctgatgtatagcaagttcagcagcaaatctgacatttgggcttttggggttttgatgtgggaaatttactccctggggaagatgccatatgagagatttactaacagtgagactgctgaacacattgcccaaggcctacgtctctacaggcctcatctggcttcagagaaggtatataccatcatgtacagttgttggcatgagaaagcagatgagcgtcccactttcaaaattcttctgagcaatattctagatgtcatggatgaagaatcctgagctcgccaataagcttcttggttctacttctcttctccacaagccccaatttcactttctcagaggaaatcccaagcttaggagccctggagcctttgtgctcccactcaatacaaaaaggcccctctctacatctggggatgcacctcttctttgattccctgggatagtggcttctgagcaaaggccaaaaaattattgtgcctgaaatttcccgagagaattaagacagactgaatttgcgatgaaaatattttttaggagggaggatgtaaatagccgcacaaaggggtccaacagctctttgagtaggcatttggtagagcttgggggtgtgtgtgtgggggtggaccgaatttggcaagaatgaaatggtgtcataaagatgggaggggagggtgttttgataaaataaattctagaaagcttaaaaaaaaaaaaaaaaaaa

SEQ ID NO: 2359 - protein, 659 aa, Homo sapien
MAAVILESIFLKRSQQKKKTSPLNFKKRLFLLTVHKLSYYEYDFERGRRGSKKGSIDVEKITCVETVVPEKNPPPERQIPRRGEESSEMEQISIIERFPYPFQVVYDEGPLYVFSPTEELRKRWIHQLKNVIRYNSDLVQKYHPCFWIDGQYLCCSQTAKNAMGCQILENRNGSLKPGSSHRKTKKPLPPTPEEDQILKKPLPPEPAAAPVSTSELKKVVALYDYMPMNANDLQLRKGDEYFILEESNLPWWRARDKNGQEGYIPSNYVTEAEDSIEMYEWYSKHMTRSQAEQLLKQEGKEGGFIVRDSSKAGKYTVSVFAKSTGDPQGVIRHYVVCSTPQSQYYLAEKHLFSTIPELINYHQHNSAGLISRLKYPVSQQNKNAPSTAGLGYGSWEIDPKDLTFLKELGTGQFGVVKYGKWRGQYDVAIKMIKEGSMSEDEFIEEAKVMMNLSHEKLVQLYGVCTKQRPIFIITEYMANGCLLNYLREMRHRFQTQQLLEMCKDVCEAMEYLESKQFLHRDLAARNCLVNDQGVVKVSDFGLSRYVLDDEYTSSVGSKFPVRWSPPEVLMYSKFSSKSDIWAFGVLMWEIYSLGKMPYERFTNSETAEHIAQGLRLYRPHLASEKVYTIMYSCWHEKADERPTFKILLSNILDVMDEES

SEQ ID NO: 2360 - DNA, 4077 bp, Homo sapien
gaattcccagctctctgctcgctctgctcgcagtcacagacacttgagcacacgcgtacacccagacatcttcgggctgctattggattgactttgaaggttctgtgtgggtcgccgtggctgcatgtttgaatcaggtggagaagcacttcaacgctggacgaagtaaagattattgttgttattttttttttctctctctctctctcttaagaaaggaaaatatcccaaggactaatctgatcgggtcttccttcatcaggaacgaatgcaggaatttgggaactgagctgtgcaagtgctgaagaaggagatttgtttggaggaaacaggaaagagaaagaaaaggaaggaaaaaatacataatttcagggacgagagagagaagaaaaacggggactatggggagaaaaaagattcagattacgaggattatggatgaacgtaacagacaggtgacatttacaaagaggaaatttgggttgatgaagaaggcttatgagctgagcgtgctgtgtgactgtgagattgcgctgatcatcttcaacagcaccaacaagctgttccagtatgccagcaccgacatggacaaagtgcttctcaagtacacggagtacaacgagccgcatgagagccggacaaactcagacatcgtggagacgttgagaaagaagggccttaatggctgtgacagcccagaccccgatgcggacgattccgtaggtcacagccctgagtctgaggacaagtacaggaaaattaacgaagatattgatctaatgatcagcaggcaaagattgtgtgctgttccacctcccaacttcgagatgccagtctccatcccagtgtccagccacaacagtttggtgtacagcaaccctgtcagctcactgggaaaccccaacctattgccactggctcacccttctctgcagaggaatagtatgtctcctggtgtaacacatcgacctccaagtgcaggtaacacaggtggtctgatgggtggagacctcacgtctggtgcaggcaccagtgcagggaacgggtatggcaatccccgaaactcaccaggtctgctggtctcacctggtaacttgaacaagaatatgcaagcaaaatctcctcccccaatgaatttaggaatgaataaccgtaaaccagatctccgagttcttattccaccaggcagcaagaatacgatgccatcagtgtctgaggatgtcgacctgcttttgaatcaaaggataaataactcccagtcggctcagtcattggctaccccagtggtttccgtagcaactcctactttaccaggacaaggaatgggaggatatccatcagccatttcaacaacatatggtaccgagtactctctgagtagtgcagacctgtcatctctgtctgggtttaacaccgccagcgctcttcaccttggttcagtaactggctggcaacagcaacacctacataacatgccaccatctgccctcagtcagttgggagcttgcactagcactcatttatctcagagttcaaatctctccctgccttctactcaaagcctcaacatcaagtcagaacctgtttctcctcctagagaccgtaccaccaccccttcgagatacccacaacacacgcgccacgaggcggggagatctcctgttgacagcttgagcagctgtagcagttcgtacgacgggagcgaccgagaggatcaccggaacgaattccactcccccattggactcaccagaccttcgccggacgaaagggaaagtccctcagtcaagcgcatgcgactttctgaaggatgggcaacatgatcagattattacttactagtttttttttttttcttgcagtgtgtgtgtgtgctataccttaatggggaaggggggtcgatatgcattatatgtgccgtgtgtggaaaaaaaaaaagtcaggtactctgttttgtaaaagtacttttaaattgcctcagtgatacagtataaagataaacagaaatgctgagataagcttagcacttgagttgtacaacagaacacttgtacaaaatagattttaaggctaacttcttttcactgttgtgctcctttgcaaaatgtatgttacaatagatagtgtcatgttgcaggttcaacgttatttacatgtaaatagacaaaaggaaacatttgccaaaagcggcagatctttactgaaagagagagcagctgttatgcaacatatagaaaaatgtatagatgcttggacagacccggtaatgggtggccattggtaaatgttaggaacacaccaggtcacctgacatcccaagaatgctcacaaacctgcaggcatatcattggcgtatggcactcattaaaaaggatcagagaccattaaaagaggaccatacctattaaaaaaaaatgtggagttggagggctaacatatttaattaaataaataaataaatctgggtctgcatctcttattaaataaaaatataaaaatatgtacattacattttgcttattttcatataaaaggtaagacagagtttgcaaagcatttgtggctttttgtagtttacttaagccaaaatgtgtttttttccccttgatagcttcgctaatattttaaacagtcctgtaaaaaaccaaaaaggactttttgtatagaaagcactaccctaagccatgaagaactccatgctttgctaaccaagataactgttttctctttgtagaagttttgtttttgaaatgtgtatttctaattatataaaatattaagaatcttttaaaaaaatctgtgaaattaacatgcttgtgtatagctttctaatatatataatattatggtaatagcagaagttttgttatcttaatagcgggaggggggtatatttgtgcagttgcacatttgagtaactattttctttctgttttcttttactctgcttacattttataagtttaaggtcagctgtcaaaaggataacctgtggggttagaacatatcacattgcaacaccctaaattgtttttaatacattagcaatctattgggtcaactgacatccattgtatatactagtttctttcatgctatttttattttgttttttgcatttttatcaaatgcagggcccctttctgatctcaccatttcaccatgcatcttggaattcagtaagtgcatatcctaacttgcccatattctaaatcatctggttggttttcagcctagaatttgatacgctttttagaaatatgcccagaatagaaaagctatgttggggcacatgtcctgcaaatatggccctagaaacaagtgatatggaatttacttggtgaataagttataaattcccacagaagaaaaatgtgaaagactgggtgctagacaagaaggaagcaggtaaagggatagttgctttgtcatccgtttttaattattttaactgacccttgacaatcttgtcagcaatataggactgttgaacaatcccggtgtgtcaggacccccaaatgtcacttctgcataaagcatgtatgtcatctattttttcttcaataaagagatttaatagccatttcaagaaatcccataaagaacctctctatgtccctttttttaatttaaaaaaatgactcttgtctaatattcgtctataagggattaattttcagaccctttaataagtgagtgccataagaaagtcaatatatattgtttaaaagatatttcagtctaggaaagattttccttctcttggaatgtgaagatctgtcgattcatctccaatcatatgcattgacatacacagcaaagaagatataggcagtaatatcaacactgctatatcatgtgtaggacatttcttatccattttttctcttttacttgcatagttgctatgtgtttctcattgtaaaaggctgccgctgggtggcagaagccaagagaccttattaactaggctatatttttcttaacttgatctgaaatccacaattagaccacaatgcacctttggttgtatccataaaggatgctagcctgccttgtactaatgttttatatatt

SEQ ID NO: 2361 - protein, 473 aa, Homo sapien
MGRKKIQITRIMDERNRQVTFTKRKFGLMKKAYELSVLCDCEIALIIFNSTNKLFQYASTDMDKVLLKYTEYNEPHESRTNSDIVETLRKKGLNGCDSPDPDADDSVGHSPESEDKYRKINEDIDLMISRQRLCAVPPPNFEMPVSIPVSSHNSLVYSNPVSSLGNPNLLPLAHPSLQRNSMSPGVTHRPPSAGNTGGLMGGDLTSGAGTSAGNGYGNPRNSPGLLVSPGNLNKNMQAKSPPPMNLGMNNRKPDLRVLIPPGSKNTMPSVSEDVDLLLNQRINNSQSAQSLATPVVSVATPTLPGQGMGGYPSAISTTYGTEYSLSSADLSSLSGFNTASALHLGSVTGWQQQHLHNMPPSALSQLGACTSTHLSQSSNLSLPSTQSLNIKSEPVSPPRDRTTTPSRYPQHTRHEAGRSPVDSLSSCSSSYDGSDREDHRNEFHSPIGLTRPSPDERESPSVKRMRLSEGWAT

SEQ ID NO: 2362 - DNA, 1444 bp, Homo sapien
ccaccatgctcgccctggaggctgcacagctcgacgggccacacttcagctgtctgtacccagatggcgtcttctatgacctggacagctgcaagcattccagctaccctgattcagagggggctcctgactccctgtgggactggactgtggccccacctgtcccagccaccccctatgaagccttcgacccggcagcagccgcttttagccacccccaggctgcccagctctgctacgaaccccccacctacagccctgcagggaacctcgaactggcccccagcctggaggccccggggcctggcctccccgcataccccacggagaacttcgctagccagaccctggttcccccggcatatgccccgtaccccagccctgtgctatcagaggaggaagacttaccgttggacagccctgccctggaggtctcggacagcgagtcggatgaggccctcgtggctggccccgaggggaagggatccgagggactcgcaagaagctgcgcctgtaccagttcctgctggggctactgacgcgcggggacatgcgtgagtgcgtgtggtgggtggagccaggcgccggcgtcttccagttctcctccaagcacaaggaactcctggcgcgccgctggggccagcagaaggggaaccgcaagcgcatgacctaccagaagctggcgcgcgccctccgaaactacgccaagaccggcgagatccgcaaggtcaagcgcaagctcacctaccagttcgacagcgcgctgctgcctgcagtccgccgggcctgagcacacccgaggctcccacctgcggagccgctgggggacctcacgtcccagccaggatccccctggaagaaaaagggcgtccccacactctaggtgataggacttacgcatccccaccttttggggtaaggggagtgctgccctgccataatccccaagcccagcccgggcctgtctgggattccccacttgtgcctggggtccctctgggatttctttgtcatgtacagactccctgggatcctcatgttttgggtgacaggacctatggaccactatactcggggaggcagggtagcagtgcttccagagtcccaagagcttctctgggattttcttgtgatatctgattccccagtgaggcctgggacctttttaagatcgctgtgtgtctgtaaaccctgaatctcatctggggtgggggccctgctggcaaccctgagccctgtccaaggttccctcttgtcagatctgagatttcctagttatgtctggggccctctgggagctgttatcatctcagatctcttcgcccatctatggctgtgttgtcacatctgtcccctcatttttgagatcccccaattctctggaactattctgctgcccctttttatgtgtctggagttccccaatcacatctagggctcctcc

SEQ ID NO: 2363 - protein, 177 aa, Homo sapien
MLALEAAQLDGPHFSCLYPDGVFYDLDSCKHSSYPDSEGAPDSLWDWTVAPPVPATPYEAFDPAAAAFSHPQAAQLCYEPPTYSPAGNLELAPSLEAPGPGLPAYPTENFASQTLVPPAYAPYPSPVLSEEEDLPLDSPALEVSDSESDEALVAGPEGKGSEGLARSCACTSSCWGY

SEQ ID NO: 2364 - DNA, 2009 bp, Homo sapien
agctttctggggcaggccaggcctgaccttggctttggggcagggagggggctaaggtgaggcaggtggcgccagcaggtgcacacccaatgcccatgagcccagacactggacgctgaacctcgcggacagttaagaacccaggggcctctgcgcctgggcccagctctgtcccacaccgcggtcacatggcaccacctctcttgcagcctccaccaagggcccatcggtcttccccctggcaccctcctccaagagcacctctgggggcacagcggccctgggctgcctggtcaaggactacttccccgaaccggtgacggtgtcgtggaactcaggcgccctgaccagcggcgtgcacaccttcccggctgtcctacagtcctcaggactctactccctcagcagcgtggtgaccgtgccctccagcagcttgggcacccagacctacatctgcaacgtgaatcacaagcccagcaacaccaaggtggacaagaaagttggtgagaggccagcacagggagggagggtgtctgctggaagcaggctcagcgctcctgcctggacgcatcccggctatgcagccccagtccagggcagcaaggcaggccccgtctgcctcttcacccggagcctctgcccgccccactcatgctcagggagagggtcttctggctttttcccaggctctgggcaggcacaggctaggtgcccctaacccaggccctgcacacaaaggggcaggtgctgggctcagacctgccaagagccatatccgggaggaccctgcccctgacctaagcccaccccaaaggccaaactctccactccctcagctcggacaccttctctcctcccagattccagtaactcccaatcttctctctgcagagcccaaatcttgtgacaaaactcacacatgcccaccgtgcccaggtaagccagcccaggcctcgccctccagctcaaggcgggacaggtgccctagagtagcctgcatccagggacaggccccagccgggtgctgacacgtccacctccatctcttcctcagcacctgaactcctggggggaccgtcagtcttcctcttccccccaaaacccaaggacaccctcatgatctcccggacccctgaggtcacatgcgtggtggtggacgtgagccacgaagaccctgaggtcaagttcaactggtacgtggacggcgtggaggtgcataatgccaagacaaagccgcgggaggagcagtacaacagcacgtaccgggtggtcagcgtcctcaccgtcctgcaccaggactggctgaatggcaaggagtacaagtgcaaggtctccaacaaagccctcccagcccccatcgagaaaaccatctccaaagccaaaggtgggacccgtggggtgcgagggccacatggacagaggccggctcggcccaccctctgccctgagagtgaccgctgtaccaacctctgtcctacagggcagccccgagaaccacaggtgtacaccctgcccccatcccgggatgagctgaccaagaaccaggtcagcctgacctgcctggtcaaaggcttctatcccagcgacatcgccgtggagtgggagagcaatgggcagccggagaacaactacaagaccacgcctcccgtgctggactccgacggctccttcttcctctacagcaagctcaccgtggacaagagcaggtggcagcaggggaacgtcttctcatgctccgtgatgcatgaggctctgcacaaccactacacgcagaagagcctctccctgtctccgggtaaatgagtgcgacggccggcaagccccgctccccgggctctcgcggtcgcacgaggatgcttggcacgtaccccctgtacatacttcccgggcgcccagcatggaaataaagcacccagcgctgccctgggcccctgcgagactgtgatggttctttccacgggtcaggccgagtctgaggcctgagtggcatgagggaggcagagcgggtc

SEQ ID NO: 2365 - protein, 329 aa, Homo sapien
STKGPSVFPLAPSSKSTSGGTAALGCLVKDYFPEPVTVSWNSGALTSGVHTFPAVLQSSGLYSLSSVVTVPSSSLGTQTYICNVNHKPSNTKVDKKVEPKSCDKTHTCPPCPAPELLGGPSVFLFPPKPKDTLMISRTPEVTCVVVDVSHEDPEVKFNWYVDGVEVHNAKTKPREEQYNSTYRVVSVLTVLHQDWLNGKEYKCKVSNKALPAPIEKTISKAKGQPREPQVYTLPPSRDELTKNQVSLTCLVKGFYPSDIAVEWESNGQPENNYKTTPPVLDSDGSFFLYSKLTVDKSRWQQGNVFSCSVMHEALHNHYTQKSLSLSPGK

SEQ ID NO: 2366 - DNA, 1462 bp, Homo sapien
gcccgcgccgcgccgctctttctccgacagctgccgggggtgccctgcaagctgttccgcgcgtcctgcccgtctgtccccgcgggtcgtcgcccgccacagccgcgccatgaccacccagcagatagacctccagggcccggggccgtggggcttccgcctcgtgggcggcaaggacttcgagcagcctctcgccatttcccgggtcactcctggaagcaaggcggctctagctaatttatgtattggagatgtaatcacagccattgatggggaaaatactagcaatatgacacacttggaagctcagaacagaatcaaaggctgcacagacaacttgactctcactgtagccagatctgaacataaagtctggtctcctctggtgacggaggaagggaagcgtcatccatacaagatgaatttagcctctgaaccccaggaggtcctgcacataggaagcgcccacaaccgaagtgccatgccctttaccgcctcgcctgcctccagcactactgccagggtcatcacaaaccagtacaacaacccagctggcctctactcttctgaaaatatctccaacttcaacaatgccctggagtcaaagactgctgccagcggggtggaggcgaacagcagacccttagaccatgctcagcctccaagcagccttgtcatcgacaaagaatctgaagtttacaagatgcttcaggagaaacaggagttgaatgagcccccgaaacagtccacgtctttcttggttttgcaggaaatcctggagtctgaagaaaaaggggatcccaacaagccctcaggattcagaagtgttaaagctcctgtcactaaagtggctgcgtcgattggaaatgctcagaagttgcctatgtgtgacaaatgtggcactgggattgttggtgtgtttgtgaagctgcgggaccgtcaccgccaccctgagtgttatgtgtgcactgactgtggcaccaacctgaaacagaagggccatttctttgtggaggatcaaatctactgtgagaagcatgcccgggagcgagtcacaccacctgagggttatgaagtggtcactgtgttccccaagtgagccagcagatctgaccactgttctccagcaggcctctgctgcagctttttctctcagtgttctggccctctcctctcttgaaagttctctgcttactttggttttccctctgcttgtaaaacattgagtcccctccctgccttggttaattgactcacaccagctgtgcgatgcccgcttttacaattaaaggaaaactgttttgttcagtgtcaccttgtcagcaacactgtgtcccttcgccccaccgttcttctctgctgcatttggacatcagccaaatttgaacccaatcaaatataacgtgtctgacactgattttgtttttactcaataaatgtatagactacaaaaaaaaaaaaa

SEQ ID NO: 2367 - protein, 329 aa, Homo sapien
MTTQQIDLQGPGPWGFRLVGGKDFEQPLAISRVTPGSKAALANLCIGDVITAIDGENTSNMTHLEAQNRIKGCTDNLTLTVARSEHKVWSPLVTEEGKRHPYKMNLASEPQEVLHIGSAHNRSAMPFTASPASSTTARVITNQYNNPAGLYSSENISNFNNALESKTAASGVEANSRPLDHAQPPSSLVIDKESEVYKMLQEKQELNEPPKQSTSFLVLQEILESEEKGDPNKPSGFRSVKAPVTKVAASIGNAQKLPMCDKCGTGIVGVFVKLRDRHRHPECYVCTDCGTNLKQKGHFFVEDQIYCEKHARERVTPPEGYEVVTVFPK

SEQ ID NO: 2368 - DNA, 3348 bp, Homo sapien
cgcaatttccactcgcggggagcaggaaacccggcgcagccgggcgcattgggccgcgatgcaacagcagcagcaggagtcgccccggggcagcagcggcagcagcagcagaggcagcagcgggcggcgctgagccgccgccgccgccactgaggaagaagccggcccagccgccgccgcgtccggaccctcgcgcctggatcccagcgccccgatcccggcgccccaacccccacgcccgcctccgccaactttcacgctgcctcggcggcccggcccggctcgacgccaatggtggaggccatagtggagtttgactaccaggcccagcacgatgatgagctgacgatcagcgtgggtgaaatcatcaccaacatcaggaaggaggatggaggctggtgggagggacagatcaacggcaggagaggtttgttccctgacaactttgtaagagaaataaagaaagagatgaagaaagaccctctcaccaacaaagctccagaaaagcccctgcacgaagtgcccagtggaaactctttgctgtcttctgaaacgattttaagaaccaataagagaggcgagcgacggaggcgccggtgccaggtggcattcagctacctgccccagaatgacgatgaacttgagctgaaagttggcgacatcatagaggtggtaggagaggtagaggaaggatggtgggaaggtgttctcaacgggaagactggaatgtttccttccaacttcatcaaggagctgtcaggggagtcggatgagcttggcatttcccaggatgagcagctatccaagtcaagtttaagggaaaccacaggctccgagagtgatgggggtgactcaagcagcaccaagtctgaaggtgccaacgggacagtggcaactgcagcaatccagcccaagaaagttaagggagtgggctttggagacattttcaaagacaagccaatcaaactaagaccaaggtcaattgaagtagaaaatgactttctgccggtagaaaagactattgggaagaagttacctgcaactacagcaactccagactcatcaaaaacagaaatggacagcaggacaaagagcaaggattactgcaaagtaatatttccatatgaggcacagaatgatgatgaattgacaatcaaagaaggagatatagtcactctcatcaataaggactgcatcgacgtaggctggtgggaaggagagctgaacggcagacgaggcgtgttccccgataacttcgtgaagttacttccaccggactttgaaaaggaagggaatagacccaagaagccaccgcctccatccgctcctgtcatcaaacaaggggcaggcaccactgagagaaaacatgaaattaaaaagatacctcctgaaagaccagaaatgcttccaaacagaacagaagaaaaagaaagaccagagagagagccaaaactggatttacagaagccctccgttcctgccataccgccaaaaaagcctcggccacctaagaccaattctctcagcagacctggcgcactgcccccgagaaggccggagagaccggtgggtccgctgacacacaccaggggtgacagtccaaagattgacttggccggcagttcgctatctggcatcctggacaaagatctctcggaccgcagcaatgacattgacttagaaggttttgactccgtggtatcatctactgagaaactcagtcatccgaccacaagcagaccaaaagctacagggaggcggcctccgtcccagtccctcacatcttcatccctttcaagccctgatatcttcgactccccaagtcccgaagaggataaggaggaacacatttcacttgcgcacagaggagtggacgcgtcaaagaaaacttccaagactgttaccatatcccaagtgtctgacaacaaagcatccctgccgcccaagccggggaccatggcagcaggtggcggtgggccagcccctctgtcctcagcggcgccctcccccctgtcatcctctttgggaacagctggacacagagccaactccccgtctctgttcggcacggaaggaaaaccaaagatggagcctgcggccagcagccaggcggccgtggaggagctaaggacacaggtccgcgagctgaggagcatcatcgagaccatgaaggaccagcagaaacgagagattaaacagttattgtctgagttggatgaagagaagaaaatccggcttcggttgcagatggaagtgaacgacataaagaaagctctacaatcaaaatgaatacttgatcaatgaaatgtcacattattcatcctgagtccgagactcaaattttctgccccagccaaaataatcttgtgccaaaagattaaaggtttgcctcaaaatgtccctgtttgaaagattagcacaaaagtcttgatagcacaacacaaattccatccaagaggagaatcttccccagggtttagtcctggggctggcactcgttgtgacttacacagagcaaaattgtgctaaaggcttttctactctgagatctcaatgcgaaatgaaaactcaggcagtttagtccatagtggtactattttgatgatattttccattaataaaatgtaatttcagattattcgtttacaagctttataattttatgattttttaatcgtgttttgtcacagacttccctagtgtttgtactacacgtagtcagaagcgagtgtccttttcttttgcttcaggctaagagctgcctcgctctttgtccccccattaggattctattacatatgcaattgtaggttcaacctgtccctttccctgccagcaaaccccaccaccctaagagaaattttagcttatatatgacggtatatttacaaaaagagaaagagaaaatctggtatttgcaatgatctgtgccttctttttaccaccctcttgattggagcttttgtgatgcagctaccatgattcaaaaaaattaaaaattaaaaaaaaaaaatctgccacttatccaagtccactagaggccactgtcttcaaagcttctctcaccctagccaaaggtcctaagaggagacagctgtgaagttgggcgtgctctgtggtaccagctgtgacttttctatttctcctagttttaggttgttcatgaaactagaaatgtcatcctgcttgatttttcatcagccaagttaaacccctgctttctgtcctttgcaccttttgcgtgaacagaatatgcattattaaagcaaaaataaataaaagtaaaatgcaaatgaaaacaaggaaaaaaaaaaaaaaaaaaaaaaaaaaaaaaaaaaaaaaaaaaaa

SEQ ID NO: 2369 - protein, 665 aa, Homo sapien
MVEAIVEFDYQAQHDDELTISVGEIITNIRKEDGGWWEGQINGRRGLFPDNFVREIKKEMKKDPLTNKAPEKPLHEVPSGNSLLSSETILRTNKRGERRRRRCQVAFSYLPQNDDELELKVGDIIEVVGEVEEGWWEGVLNGKTGMFPSNFIKELSGESDELGISQDEQLSKSSLRETTGSESDGGDSSSTKSEGANGTVATAAIQPKKVKGVGFGDIFKDKPIKLRPRSIEVENDFLPVEKTIGKKLPATTATPDSSKTEMDSRTKSKDYCKVIFPYEAQNDDELTIKEGDIVTLINKDCIDVGWWEGELNGRRGVFPDNFVKLLPPDFEKEGNRPKKPPPPSAPVIKQGAGTTERKHEIKKIPPERPEMLPNRTEEKERPEREPKLDLQKPSVPAIPPKKPRPPKTNSLSRPGALPPRRPERPVGPLTHTRGDSPKIDLAGSSLSGILDKDLSDRSNDIDLEGFDSVVSSTEKLSHPTTSRPKATGRRPPSQSLTSSSLSSPDIFDSPSPEEDKEEHISLAHRGVDASKKTSKTVTISQVSDNKASLPPKPGTMAAGGGGPAPLSSAAPSPLSSSLGTAGHRANSPSLFGTEGKPKMEPAASSQAAVEELRTQVRELRSIIETMKDQQKREIKQLLSELDEEKKIRLRLQMEVNDIKKALQSK

SEQ ID NO: 2370 - DNA, 2112 bp, Homo sapien
cccgcttctggagtgttatcgtcaccatgtccctaatggtctcggctggccggggcctgggggccgtgtggtccccaacccacgtgcaggtgacggtgctgcaggcgcggggcctgcgggccaagggccccgggggcacgagcgacgcgtacgcggtgatccaggtgggcaaggagaagtacgccacctccgtgtcggagcgcagcctgggcgcgcccgtgtggcgcgaggaggccaccttcgagctgccatcgctgctgtcctccggacccgcggccgccgccaccctgcagctcaccgtgctgcaccgcgcgctgctcggcctcgacaagttcctgggccgcgccgaggtggacctgcgggatctgcaccgcgaccagggccgcaggaagacgcagtggtataagttgaaatccaaaccaggaaagaaggacaaggagcgaggagaaattgaggttgacatccagtttatgagaaacaacatgactgccagcatgtttgacctttctatgaaagacaagtctcggaatccatttggaaagctgaaggacaagatcaaggggaagaataaggacagtgggtcagacaccgcctccgccatcatccctagcacgacaccttcggtcgacagtgatgatgagtctgtggttaaagacaagaaaaagaaatcaaagatcaagaccttactttccaagtcaaatttgcagaagacgcctctttcccagtccatgtctgtcctgccgacttcaaagccagaaaaagtgctgcttcgtcccggagactttcagtcccagtgggatgaagatgacaatgaggatgagtcctcctcggcctcggatgtcatgtctcacaagagaacagcgagtacggatcttaagcaactgaaccaggtcaactttacccttcccaagaaggaaggactttcctttcttggtggccttcggtctaagaatgatgtcctttcccgctctaatgtctgcatcaatgggaaccatgtttacctggagcagccccaacccaccggtgagatcaaggatagcagcccgtcctcctccccatcccccaagggtttcagaaagaaaacattgttctcttctacagagaacctggcggctgggtcttggaaggagcctgctgaaggaggtgggctgtctactgacagggatgtctccgaatcttccaccaaggactccttgaagtctatgaccttgccgacctaccgacctgccccactgatcagtggggacctcagggaaaaaatggcccccgcaaactcagaggccacaaaagaagctaaggagagcaagaagccagagagcaggaggtcctctttgctgtctctgatgacggggaagaaggatgtggctaagggcagtgaaggtgaaaaccttctcacggtcccagggagggagaaggaaggcatgctgatgggggttaagccgggggaggacgcatcggggcctgctgaagaccttgtgagaagatctgagaaagatactgcagctgttgtctccagacagggcagctccctgaacctctttgaagatgtgcagatcacagaaccagaagctgagccagagtccaagtctgaaccgagacctccaatttcctctccgagggctccccagaccagagctgtcaagccccgacttcatcctgtgaagccaatgaatgccacggccaccaaggttgctaactgcagcttgggaactgccaccatcatcagtgagaacttgaacaatgaggtcatgatgaagaaatacagcccctcggaccctgcatttgcatatgcgcagctgacccacgatgagctgattcagctggtcctcaaacagaaggaaacgataagcaagaaggagttccaggtccgcgagctggaagactacattgacaacctgcttgtcagggtcatggaagaaacccccaatatcctccgcatcccgactcaggttggcaaaaaagcaggaaagatgtaaatcagcagaaaaaaaacaccgagacgtttctgtgacttcactttcacctgctccaggggtcaaggacttgccttgcctgataaccagccagcaggctccgaatcaccatctccctcacatgttatccggcaagagt

SEQ ID NO: 2371 - protein, 649 aa, Homo sapien
MSLMVSAGRGLGAVWSPTHVQVTVLQARGLRAKGPGGTSDAYAVIQVGKEKYATSVSERSLGAPVWREEATFELPSLLSSGPAAAATLQLTVLHRALLGLDKFLGRAEVDLRDLHRDQGRRKTQWYKLKSKPGKKDKERGEIEVDIQFMRNNMTASMFDLSMKDKSRNPFGKLKDKIKGKNKDSGSDTASAIIPSTTPSVDSDDESVVKDKKKKSKIKTLLSKSNLQKTPLSQSMSVLPTSKPEKVLLRPGDFQSQWDEDDNEDESSSASDVMSHKRTASTDLKQLNQVNFTLPKKEGLSFLGGLRSKNDVLSRSNVCINGNHVYLEQPQPTGEIKDSSPSSSPSPKGFRKKTLFSSTENLAAGSWKEPAEGGGLSTDRDVSESSTKDSLKSMTLPTYRPAPLISGDLREKMAPANSEATKEAKESKKPESRRSSLLSLMTGKKDVAKGSEGENLLTVPGREKEGMLMGVKPGEDASGPAEDLVRRSEKDTAAVVSRQGSSLNLFEDVQITEPEAEPESKSEPRPPISSPRAPQTRAVKPRLHPVKPMNATATKVANCSLGTATIISENLNNEVMMKKYSPSDPAFAYAQLTHDELIQLVLKQKETISKKEFQVRELEDYIDNLLVRVMEETPNILRIPTQVGKKAGKM

SEQ ID NO: 2372 - DNA, 1596 bp, Homo sapien
agctggggcgcggccgcctgtctgcacagacagcaccatgtcgctcatggtcgtcagcatggtgtgtgttgggttcttcttgctgcagggggcctggccacatgagggagtccacagaaaaccttccctcctggcccacccaggtcccctggtgaaatcagaagagacagtcatcctgcaatgttggtcagatgtcaggtttcagcacttccttctgcacagagaagggaagtttaaggacactttgcacctcattggagagcaccatgatggggtctccaaggccaacttctccatcggtcccatgatgcaagaccttgcagggacctacagatgctacggttctgttactcactccccctatcagttgtcagctcccagtgaccctctggacatcgtcatcacaggtctatatgagaaaccttctctctcagcccagccgggccccacggttctggcaggagagagcgtgaccttgtcctgcagctcccggagctcctatgacatgtaccatctatccagggagggggaggcccatgaacgtaggttctctgcagggcccaaggtcaacggaacattccaggccgactttcctctgggccctgccacccacggaggaacctacagatgcttcggctctttccgtgactctccatacgagtggtcaaactcgagtgacccactgcttgtttctgtcacaggaaacccttcaaatagttggccttcacccactgaaccaagctccgaaaccggtaaccccagacacctgcatgttctgattgggacctcagtggtcatcatcctcttcatcctcctcctcttctttctccttcatcgctggtgctgcaacaaaaaaaatgctgttgtaatggaccaagagcctgcagggaacagaacagtgaacagggaggactctgatgaacaagaccctcaggaggtgacatatgcacagttgaatcactgcgttttcacacagagaaaaatcactcgcccttctcagaggcccaagacacccccaacagatatcatcgtgtacacggaacttccaaatgctgagccctgatccaaagttgtctcctgcccatgagcaccacagtcaggccttgaggggatcttctagggagacaacagccctgtctcaaaactgggttgccagctccaatgtaccagcagctggaatctgaaggcgtgagtctgcatcttagggcatcgctcttcctcacaccacaaatctgaacgtgcctctcccttgcttacaaatgtctaaggtccccactgcctgctggagagaaaacacactcctttgcttagcccacaattctccatttcacttgacccctgcccacctctccaacctaactggcttacttcctagtctacttgaggctgcaatcacactgaggaactcacaattccaaacatacaagaggctccctcttaacacggcacttagacacgtgctgttccaccttccctcatgctgttccacctcccctcagactagctttcagccttctgtcagcagtaaaacttatatattttttaaaataatttcaatgtagttttccctccttcaaataaacatgtctgccctca

SEQ ID NO: 2373 - protein, 341 aa, Homo sapien
MSLMVVSMVCVGFFLLQGAWPHEGVHRKPSLLAHPGPLVKSEETVILQCWSDVRFQHFLLHREGKFKDTLHLIGEHHDGVSKANFSIGPMMQDLAGTYRCYGSVTHSPYQLSAPSDPLDIVITGLYEKPSLSAQPGPTVLAGESVTLSCSSRSSYDMYHLSREGEAHERRFSAGPKVNGTFQADFPLGPATHGGTYRCFGSFRDSPYEWSNSSDPLLVSVTGNPSNSWPSPTEPSSETGNPRHLHVLIGTSVVIILFILLLFFLLHRWCCNKKNAVVMDQEPAGNRTVNREDSDEQDPQEVTYAQLNHCVFTQRKITRPSQRPKTPPTDIIVYTELPNAEP

SEQ ID NO: 2374 - DNA, 2573 bp, Homo sapien
ggtgaccaagagtacatctcttttcaaatagctggattaggtcctcatgctgctgtggtcattgctggtcatctttgatgcagtcactgaacaggcagattcgctgacccttgtggcgccctcttctgtcttcgaaggagacagcatcgttctgaaatgccagggagaacagaactggaaaattcagaagatggcttaccataaggataacaaagagttatctgttttcaaaaaattctcagatttccttatccaaagtgcagttttaagtgacagtggtaactatttctgtagtaccaaaggacaactctttctctgggataaaacttcaaatatagtaaagataaaagtccaagagctctttcaacgtcctgtgctgactgccagctccttccagcccatcgaagggggtccagtgagcctgaaatgtgagacccggctctctccacagaggttggatgttcaactccagttctgcttcttcagagaaaaccaggtcctggggtcaggctggagcagctctccggagctccagatttctgccgtgtggagtgaagacacagggtcttactggtgcaaggcagaaacggtgactcacaggatcagaaaacagagcctccaatcccagattcacgtgcagagaatccccatctctaatgtaagcttggagatccgggcccccgggggacaggtgactgaaggacaaaaactgatcctgctctgctcagtggctgggggtacaggaaatgtcacattctcctggtacagagaggccacaggaaccagtatgggaaagaaaacccagcgttccctgtcagcagagctggagatcccagctgtgaaagagagtgatgccggcaaatattactgtagagctgacaacggccatgtgcctatccagagcaaggtggtgaatatccctgtgagaattccagtgtctcgccctgtcctcaccctcaggtctcctggggcccaggctgcagtgggggacctgctggagcttcactgtgaggccctgagaggctctcccccaatcttgtaccaattttatcatgaggatgtcacccttgggaacagctcggccccctctggaggaggggcctccttcaacctctctttgactgcagaacattctggaaactactcctgtgaggccaacaacggcctgggggcccagtgcagtgaggcagtgccagtctccatctcaggacctgatggctatagaagagacctcatgacagctggagttctctggggactgtttggtgtccttggtttcactggtgttgctttgctgttgtatgccttgttccacaagatatcaggagaaagttctgccactaatgaacccagaggggcttccaggccaaatcctcaagagttcacctattcaagcccaaccccagacatggaggagctgcagccagtgtatgtcaatgtgggctctgtagatgtggatgtggtttattctcaggtctggagcatgcagcagccagaaagctcagcaaacatcaggacacttctggagaacaaggactcccaagtcatctactcttctgtgaagaaatcataacacttggaggaatcagaagggaagatcaacagcaaggatggggcatcattaagacttgctataaaaccttatgaaaatgcttgaggcttatcacctgccacagccagaacgtgcctcaggaggcacctcctgtcatttttgtcctgatgatgtttcttctccaatatcttcttttacctatcaatattcattgaactgctgctacatccagacactgtgcaaataaattatttctgctaccttctcttaagcaatcagtgtgtaaagatttgagggaagaatgaataagagatacaaggtctcaccttcatctactgtgaagtgatgagaacaggacttgatagtggtgtattaacttatttatgtgctgctggatacagtttgctaatattttgttgagaatttttgcaaatatgttcattgggaatattggcctgaaattttcttttccactgtgtctctgccagaatgtttgtatcaggctgatgctggcttcatagaatgagttaggcaggagcccttcctccttgattttttggcatagtttcagcaggattggtaccagttattctttctgcatcttgtagaattcagctatgaatccatctggtctagggcttttgtgttggttggtaagttttttattactaattcaacttcagcgcttgatattggtctaggaggggtttctgtctcttcctggttcaatcttgggagattgtgtgtttccaggaatttagccgtttcctccagattttcttctttatgtgcatcgacttgagtgtaaacataacttatatgcactgggaaaccaaaaaatctgtgtgacttgctttattgcagcatttgttttattttggtagtctggaactgaacctgcaatatcaccaaagtatgcatatagttgcaaaaatgtgatttttgacatagtaaatatgagtatttgcaataaactatgatattacttttgtaagtatatagaataaaatgtaaataatct

SEQ ID NO: 2375 - protein, 144 aa, Homo sapien
MWEWKICNSHGARPFAEPAGWEFVNLLRHHKSFLIAPLCLSVPVSRPVLTLRSPGAQAAVGDLLELHCEALRGSPPILYQFYHEDVTLGNSSAPSGGGASFNLSLTAEHSGNYSCEANNGLGAQCSEAVPVSISGGWVLPGYRV

SEQ ID NO: 2376 - DNA, 4570 bp, Homo sapien
acttggcaaatccgaagattttccgggatctttcaaagcccatgggggctcagaccaaggaaaggaagctgaaatttatccagaggtttaaagaagttgagaaaactgaaggagacatgactgtccagtgccactactacacccactactcctcggccatcatcgtggcctcctacctggtccggatgccacccttcacccaggccttctgcgctttgcagggcggaagcttcgacgtggcagacagaatgttccacagtgtgaagagcacgtgggagtcggcctccagagagaacatgagtgacgtcagggagctgaccccagagttcttctacctgcctgagttcttaaccaactgcaacggggtagagttcggctgcatgcaggacgggactgtgctaggagacgtgcagctccctccctgggctgatggggaccctcggaaattcatcagcctgcacagaaaggccctggaaagtgactttgtcagtgccaacctccaccattggatagaccttatttttgggtacaagcagcaggggccagccgcagtggatgctgttaatatcttccacccctacttctacggtgacagaatggacctcagcagcatcactgaccccctcatcaaaagcaccatcctggggtttgtcagcaactttggacaggtgcccaaacagctctttaccaaacctcacccagccaggactgcagcagggaagcctctgcctggaaaggatgtctccacccccgtgagcctgcctggccacccacagccctttttctacagcctgcagtcgctgaggccctcccaggtcacggtcaaaggtgattccctggccatgcattgtttggtgtcctgtcccagggttgtcccttcagtggctgggttcctctggaggtccagcaccacatacctgggcaaagtattggggactgactttgaatggctgcatctccagtcacagccagattctaggggggtgtcatctctgggaagtgtctaggagctcctctgttagaccctaacttctgaagacccacgtctctctgtctttctgtctgtctctctcacacacatacacacacagacacctctttcaggcacacacacacatctctcttcctcttcctctcttttatacatgcacacacacatgtacacacacataccttctctcctcaagagaccagtggagagtcccaagtttcacaaggaaggattacagcctctgtgctttggccactggtcctcctaagcagggcaggggactaagctaagcactctaagcaggcagccagtagctaagaacatgtgctctggggcagatggcccaggagtgcattccagtcctactgcttcctgactgtgtgaccttgggcaagccattgaacctccttgttcccacggggattggaatagcattgaatggatgctactacagatttgtattgatgcttagataaatgagcctgcagagagttggtgaggaaaagatgaaaaacatgagaaataggttgagccagtgaagggagccatgtgatttagggagggaagagggtcactctggccctattattgagaaacagttcttccagggaccaggggctcctcaacaaggccagtcagcaagagcgcaatgagatgggccaccttcggtgcccagcacatagtggtgattattagtccatctcttctgaccataattcagtggcttccttggctgccaccaaggctcagagaggctctatagaagcaggagtccactggggtgggggtggttccactggggtgggggtggtcccaaccagcccaggagggaggatctcccagatggaagcagaagagagggtgaggctgggttcctagggccatgtatgtatgaagtcgggtgccagtgtcatctgaggacatgcactgccttggggaaatcccactacactgaacaacatgcaggtcccaaggagtatgaagttaagttttcaatggttttagtggtgtccttttttatccttgaagtccaagaacagtgtcattggcacaccccaccctggtagataaggtgctactgctcttggctctggggaccatgcctccatttgccccaggactggggatccgctgctgcattgaagtccctgggcagtcaggcacagcccctgccctcatggaaagggacatgaggtgcaaaccacatcaacagtaacaagggagctcaaatctcccatgtgggctccaggagactgatgcagatcttaccagccacgggtcctggggatccttcctgaggctcagtttcttcatgtgtaaggtatggaagacaatggccctgccctcaggcttgtgacagtgccatgaagtggtgtctgtcacacaggcaggcaacaagccagcgctgaggcaggagtcctggcagatgctggtgccactccgagcacacacactgggccttgctttaaggggcctggctttactctctccctttgatctgagcagccccagaaggtaagggccattgatgccacagtcccttccctatggggagagacatctcacagtcttatcctggagcctttcctgaatcctgctccctctcttcctcctgggtggtagggtcaggaagagggtggttctcccacttcacccagcacagggcaaggaagggagtggcccccaccaggaggaaggaaaggcccctacgtggtgggtatggtgtgcacagtcttagaaactaggctggcctcagtgttttgagtcaacaagctgcaccaggctctgtgccaggggacacacattgaaaggggcatggttttctctactccatgggaagaggctagggtctgaagagatggaatgacttcaccagcataaccagacttggaatgaggtctgggcagctccaaatcccgtgctgtgagccatattccagctggggctgggggtggctcccagagtggagctgagggaggatgggaattgtgcctccctgtgactcctgccccggggcccggctacagtgggtgctgtccttctgtgcataagttcaagtccagtgtgtctgcctgtcactcctgcccagggcccagctgcagtgggtgctgtccttccatgcttaagttcaagtccagtgtgtctgcctgtgactcctgcctgggggcccagctgtagtgggtgctgttcttccatgcataagttcgccatactaactggggtgtagatatgtacctcttttctctaggctcagagtcccccaaaggggccattggccacattgtctctactgagaagaccattctggctgtagagaggaacaaagtgctgctgcctcctctctggaacaggaccttcagctggggctttgatgacttcagctgctgcttggggagctacggctccgacaaggtcctgatgacattcgagaacctggctgcctggggccgctgtctgtgcgccgtgtgcccatccccaacaacgattgtcacctctgggaccagcactgtggtgtgtgtgtgggagctcagcatgaccaaaggccgcccgaggggcttgcgcctccggcaggccttgtatggacacacacaggctgtcacgtgcctggcagcgtcagtcaccttcagcctcctggtgagcggctcccaggactgcacctgtatcctgtgggatctggaccacctcacccacgtgacccgcctgcccgcccatcgggaaggcatctcagccatcaccatcagtgacgtctcaggcaccattgtctcctgtgcgggagcacacttgtccctgtggaatgtcaatggacagcccctggccagcatcaccacagcctggggcccagaaggagccataacctgctgctgcctgatggagggcccagcatgggacacaagccagatcatcatcaccgggagtcaagacggcatggtccgggtttggaagactgaggatgtgaagatgtctgttcctggacggccagcaggagaggagcccccggctcagcctccaagcccaagaggccacaagtgggagaagaacctggccttgagtcgagagctggacgttagcattgctttgacagggaagcccagcaaaaccagccccgcagtgactgctctggccgtgtccagaaaccacaccaaactcctggttggtgatgagagggggagaatattctgctggtctgcagatgggtaggaagagagaggcagcagaggctctggcacaacagtgccaggctgagggtggcagaggtgactggggcctgagctctgcctacagaagaaacccccagggcctccttccccacagttctcaaggaagggcctctggcaatcacagctctgcagcccaaccctctccatggccgatgggacttctatgaaaaggatgagcacacacactcggagggctgagcagcacgctggaaactgtgacttggtgatgcccagctgcacacgaaattacacatgactcaccttattaagggctattgcactgaaaaaaaaaaaagatgggtcgcttactggaaattattgtattgtctttattttattaaagcaactatgttttaaatgc

SEQ ID NO: 2377 - DNA, 632 bp, Homo sapien
ctgtgacagacggcactcacactgatttctatgtcctaccagacactgccctggcgacacacaaacctcaagtaatgagggtccagataagatcattagacaataggcttccccagattactaccaacaggggtgccccagccttgaagcgccttcacactggacacatgggcttcctgattaccagcaagtctctgaaggcagaagatcaggacagtccccacaggcttctgaagtataaagtgaccagaggaccagagcatggcttcattatcaaaactggccttggaaaccagagcactcgagtgtttacacaagctgacattgatgagatgaagatatcctatgtcttgaatgagggcagcaacgcatcaaaggacatcttctatttctctgttgaagacaatggaggaaataaactaacaaatcagcctttccatctaaactgggcttggatttgtttggagaaagagtactacattgtggatgaagattccacattcttagaagtgacccttacacgcagaggataccttggagaaacatcatttatcagcattggtaccaaagatgaaactgcaaaaaaagacaaagatttcaaatggaagaccaataaacagatccagttcaat

SEQ ID NO: 2378 - protein, 209 aa, Homo sapien
VTDGTHTDFYVLPDTALATHKPQVMRVQIRSLDNRLPQITTNRGAPALKRLHTGHMGFLITSKSLKAEDQDSPHRLLKYKVTRGPEHGFIIKTGLGNQSTRVFTQADIDEMKISYVLNEGSNASKDIFYFSVEDNGGNKLTNQPFHLNWAWICLEKEYYIVDEDSTFLEVTLTRRGYLGETSFISIGTKDETAKKDKDFKWKTNKQIQF

SEQ ID NO: 2379 - DNA, 1798 bp, Homo sapien
gtgccaaccaaaccctgaacagaggaggtggcggtggtggccctcgcctgtggcccccgtgctgcttgcactcgaactcgtcgccatggaggagctccaggagcctctgagaggacagctccggctctgcttcacgcaagctgcccggactagcctcttactgctcaggctcaacgacgctgccctgcgggcgctgcaagagtgtcagcggcaacaggtacggccggtgattgctttccaaggccaccgagggtatctgagactcccaggccctggttggtcctgcctcttctccttcatagtgtcccagtgttgtcaggagggcgctggtggtagcttggaccttgtgtgccaacgcttcctcaggtctgggcctaacagcctccactgcctgggctcactcagggagcgcctcattatttgggcagccatggattctatcccagccccatcatcagttcagggacacaacctgactgaagatgccagacatcctgagagttggcagaacacaggaggctattctgaaggagatgcagtatcacagccacagatggcactagaggaggtgtcagtgtcagatccactggcaagcaaccaaggacagtcactcccaggatcctcaagggagcacatggcacagtgggaagtgagaagccagacccatgttccaaacagagaacctgttcaggcactgccttcctctgccagccggaaacgtctggacaagaaacgttcagtgcctgtagccactgtagaactggaagaaaagaggttcagaactctgcctttagtgccaagccccctacaaggcctgaccaatcaggatttacaagagggagaagattgggagcaagaagatgaggacatggaccccagattagaacacagttcctcagttcaagaagattctgaatccccaagtcctgaagatataccagactacctcctgcaatacagggccatccacagtgcagaacagcaacatgcctatgagcaggactttgagacagattatgctgaataccgcatcctgcatgcccgtgttgggactgcaagccaaaggttcatagagctgggagcagagattaaaagagttcggcgaggaactccagaatacaaggtcctggaagacaagataatccaggaatataaaaagttcaggaagcagtacccaagttacagagaagaaaagcgtcgctgtgagtaccttcaccagaaattgtcccacattaaaggtctcatcctggagtttgaggaaaagaacaggggcagctgaagttatcaagggaatttttgagcctctgcttagtgaaacacaaaggaacaaagcagctataaactaaatagaatgcaactatctgcttttcttatgctgaccactggagtccatggtggcaagtagagagctgctctaggttcttgaggtttggttttcattattaatttttagggtatgggcactgtgcaaagactccatagctgtgcctaggagtctaggaaaagtgacagaggcttggcttttttacctttagttcagccaagtcattttcaagtcctgagaaatgacatcatcttcaggataaaataatgaggacattagacaaaccaaactaagtgaattttagcctggtagcctctctaaggaaacagtaataataacttctgataagagttaaaagaacttgtagcatacctggatataatgggaaagggcctgggtgttacccatgtactgaaaatgaacttttaccaacatggctaaaaaattaaaaaaaaaaaaaaaaaaaaaaaaaaa

SEQ ID NO: 2380 - protein, 397 aa, Homo sapien
MEELQEPLRGQLRLCFTQAARTSLLLLRLNDAALRALQECQRQQVRPVIAFQGHRGYLRLPGPGWSCLFSFIVSQCCQEGAGGSLDLVCQRFLRSGPNSLHCLGSLRERLIIWAAMDSIPAPSSVQGHNLTEDARHPESWQNTGGYSEGDAVSQPQMALEEVSVSDPLASNQGQSLPGSSREHMAQWEVRSQTHVPNREPVQALPSSASRKRLDKKRSVPVATVELEEKRFRTLPLVPSPLQGLTNQDLQEGEDWEQEDEDMDPRLEHSSSVQEDSESPSPEDIPDYLLQYRAIHSAEQQHAYEQDFETDYAEYRILHARVGTASQRFIELGAEIKRVRRGTPEYKVLEDKIIQEYKKFRKQYPSYREEKRRCEYLHQKLSHIKGLILEFEEKNRGS

SEQ ID NO: 2381 - DNA, 1244 bp, Humanized
atggaagccccagctcagcttctcttcctcctgctactctggctcccagataccaccggagaaattgtgttgacacagtctccagccaccctgtctttgtctccaggggaaagagccaccctctcctgcagggccagtcagagtgttggcagctacttagcctggtaccaacagaaacctggccaggctcccaggcccctcatctatgatgcatccaacagggccactggcatcccagccaggttcagtggcagtgggtctgggacagacttcactctcaccatcagcagcctagagcctgaagattttgcagtttattactgtcaacaccgtgacaattggcctccgggggccactttcggcggagggaccaaggtggagatcaaacataccaccggagaaattgtgttgacacagtctccagccaccctgtctttgtctccaggggaaagagccaccctctcctgcagggccagtcagagtgttggcagctacttagcctggtaccaacagaaacctggccaggctcccaggcccctcatctatgatgcatccaacagggccactggcatcccagccaggttcagtggcagtgggtctgggacagacttcactctcaccatcagcagcctagagcctgaagattttgcagtttattactgtcaacaccgtgacaattggcctccgggggccactttcggcggagggaccaaggtggagatcaaacgaactgtggctgcaccatctgtcttcatcttcccgccatctgatgagcagttgaaatctggaactgcctctgttgtgtgcctgctgaataacttctatcccagagaggccaaagtacagtggaaggtggataacgccctccaatcgggtaactcccaggagagtgtcacagagcaggacagcaaggacagcacctacagcctcagcagcaccctgacgctgagcaaagcagactacgagaaacacaaagtctacgcctgcgaagtcacccatcagggcctgagctcgcccgtcacaaagagcttcaacaggggagagtgttagagggagaagtgcccccacctgctcctcagttccagcctgaccccctcccatcctttggcctctgaccctttttccacaggggacctacccctattgcggtcctccagctcatctttcacctcacccccctcctcctccttggctttaattatgctaatgttggaggagaatgaataaataaagtgaatctttgc

SEQ ID NO: 2382 - DNA, 826 bp, Homo sapien
  Unsure 186-251: Unknown base
  Unsure 314-337: Unknown base
aaataaagatggttcttaacttttaaattaagatttttaaattaagatgaatcttgatttttaaattagtatggttttaagatagttttacagatagattagataatctatctagagatagacagggagagatatctatcaatacatatctctatctagatatagatagatggttttctatatagnnnnnnnnnnnnnnnnnnnnnnnnnnnnnnnnnnnnnnnnnnnnnnnnnnnnnnnnnnnnnnnnnnttatatctacatctgtatttctacatgtatataggtatgtatatatctacatgtatatatgtnnnnnnnnnnnnnnnnnnnnnnnnatctgtatatatgcatatacatgcctatctatctttatctacatgtattacatagatagggtaattactgataaatcctttggtcttctttgtaaatctctgggctaaagacccctccagtattatacgtgttctggtctagattgctcactcaccggttctcctcactatctagagaagatccacttagcaggcctccccttaaagaagggcaccttaactggactcactcctcccatagtagactgcacagtacacaagcagaagaggagagctcaataataaagtcaccataaaggataatttttaaatgaataaagacatcagaaaatccagtattggctagcacatatggctatcagcaagctcaccctacaaaaaaatagtgagaaaacagttcgaatattggccgtttggggcacatattctacaaaaaggaaaagttttgaaatgtatatatatttaatttaactctttaaaatatttgta

SEQ ID NO: 2383 - protein, 91 aa, Homo sapien
  unsure 6: unknown amino acid
  unsure 7: unknown amino acid
  unsure 8: unknown amino acid
  unsure 9: unknown amino acid
  unsure 10: unknown amino acid
  unsure 11: unknown amino acid
  unsure 12: unknown amino acid
  unsure 13: unknown amino acid
  unsure 14: unknown amino acid
  unsure 15: unknown amino acid
  unsure 16: unknown amino acid
  unsure 17: unknown amino acid
  unsure 18: unknown amino acid
  unsure 19: unknown amino acid
  unsure 20: unknown amino acid
  unsure 21: unknown amino acid
  unsure 22: unknown amino acid
  unsure 23: unknown amino acid
  unsure 24: unknown amino acid
  unsure 25: unknown amino acid
  unsure 26: unknown amino acid
  unsure 27: unknown amino acid
  unsure 28: unknown amino acid
  unsure 49: unknown amino acid
  unsure 50: unknown amino acid
  unsure 51: unknown amino acid
  unsure 52: unknown amino acid
  unsure 53: unknown amino acid
  unsure 54: unknown amino acid
  unsure 55: unknown amino acid
  unsure 56: unknown amino acid
MVFYIXXXXXXXXXXXXXXXXXXXXXXXISTSVFLHVYRYVYIYMYICXXXXXXXXICIYAYTCLSIFIYMYYIDRVITDKSFGLLCKSLG

SEQ ID NO: 2384 - DNA, 559 bp, Homo sapien
ttttacattatgaataacttttatttgtttatacaagttttgaatttcatctattttttatgtaaatagctcgatcttcaaaaatatccttcagctctgacaacctcttcacataactttcctgtaagatcttttaaatatccaaacctgtaaaagtccacattcagttgttctttgttccttagtttgcttcaacaacatcaatgcaaggttaatagaagctatttacttaccatatggtaggtggctcagaaccttctatttctaagtaatcatatttctcttccatttgaaaatcagtaaatatgagtgaaattgtgtccccaggctctgctacaatggtccaagtgcaatcagcattgttatggtactcattaggaaaactagggctggatatgatgccactggatcctctcattgttcctccacaagcatcttcagctctacagataggaacaggaaaatcccacgaagctgtattaactgaattggccatgcaggtgagctgagggtggccatcaaggatgtatccagttacacagctgtagcggatcttgtc

SEQ ID NO: 2385 - DNA, 3071 bp, Homo sapien
aatgaatccctgcggttggctgggggcagtgggtcccacactgcctaacttccctaaatgggcagcttcacttttagaaccccgggtccttccctggcaggcccaggtggcacatcctgtgtcgggtgggccctcaccttggatctccaggcctgacactgcccagctggatggaaccatggccccagccttcctgctgctgctgctgctgtggccacagggttgcgtctcaggcccctctgctgacagtgtatacacaaaagtgaggctccttgaaggggagactctgtctgtgcagtgctcctataagggctacaaaaaccgtgtggagggcaaggtttggtgcaaaatcaagaagaagaagtgtgagcctggctttgcccgagtctgggtgaaagggccccgctacttgctgcaggacgatgcccaggccaaggtggtcaacatcaccatggtggccctcaagctccaggactcaggccgatactggtgcatgcgcaacacctctgggatcctgtaccccttgatgggcttccagctggatgtgtctccagctccccaaactgagaggaacattcctttcacacatctggacaacatcctcaagggtggaactgtcacaactggccaagcccctacctcaggccctgatgccccttttaccactggtgtgatggtgttcaccccaggactcatcaccttgcctaggctcttagcctccaccagacctgcctccaagacaggctacagcttcactgctaccagcaccaccagccagggacccaggaggaccatggggtcccagacagtgaccgcgtctcccagcaatgccagggactcctctgctggcccagaatccatctccactaagtctggggacctcagcaccagatcgcccaccacagggctctgcctcaccagcagatctctcctcaacagactaccctccatgccctccatcaggcaccaggatgtttactccactgtgcttggggtggtgctgaccctcctggtgctgatgctgatcatggtctatgggttttggaagaagagacacatggcaagctacagcatgtgcagcgatccttctacacgtgacccacctggaagaccagagccctatgtggaagtctacttgatctgaggccacttaagcatggggtggggagcttctcccagagtggccccagggggttagaggaggggtgaagattggggccagtatcgatcttatgaagctggaggacttgtgcagtgctggactcacccaggacttcccaaacccagaggctgccatcctaagcagccccacagcccagtgttctccttgggggcaggaacctggggaggggcccagagcaaagggcatcagggagaaagtcccgaggaaatgtgaccagtggcttctgctcggagctgcagaccccagggctcttggtggaggcaggggaaccctgagagtgctgtttacagagaacctcagctcccgtctgcctcagaaaccctactgggctgagctgccctccccaccagggccgctgtgtcctctgcttccctccgttctgcttcagcttcccctaaggttagggaagaaagaatcgggctcacgaatgccagaggcagtgatgtcccatcctggaggagaggaaacagtgactaaaagctggggacccacagaggggttggcagcttctcttgtcgggacaggtgtcctttgctgggcctctggatggccctgccctgactggggctgctcctccctcctgtcctgggaccccgcagagcccacgctctcactgctgcctcctgctggccgctgcctccttagaaagctgtgaccaggcagctaagagcctctgggctgcagggtcagcctctcccaagactgaagtgcagaggctggacttggggctctctcccccagcttctacacctgggctccaagtctgagttcccacaggggacccagcagcctccaggaagtccataccctggggtggctgagaccttggctctgtatggaggctgctcaccccacagacactggtggggagaccatggctcagaggaagggtggagcaaccctactcctacccctcaggatagagagagaagacacacttgggacacagtgaagacagtaacttggaactgaccacggcctggaggactggcccaggcagggggacagggaaaatggagcccaagtagcctctggccagggacccaatgtcccgaggaatctgcctcccacccactgactcagggctcagactcagcctctattgtccagagcactggcttggcgtccagcaatgaaggctggagaatgcagcctggattcccctacacacacacacacacacacacacacacacacacacacacacacacacacacacaggtgtctactgacctggagtgactggaatagcacctggggataaatgtgacaactgtgcattgaaccctgggtcagggacgttccaatggccaagagagtgacacagccaggaccctggtggacagccagaggggccacttcaggatggatgtggggagagtggaagaggcagggagtaatcctgggggacagcagggaggaggcacttcttccctatgtccaggagagggcaatagagggaagactgaggctgaagaattgacggctctggacccaggacagacagacagacagacagacagacacgcacacacacccatctctgtctagcaagcagcctcctaagatagctgttctccctatcatgacggtgtagccaccatcctgttgtatactaggagagaacttaacccacctgggggaaaatagctccccaagagctggcaccagtaccactgatggccctgcttcctctgagtgagatgcccaggaggaggagccctagggaagaagtcagggacagggaccaggataccactctgtcactgtgtgaccctcagcaagtcactaacccttggcctcatttttcctgtcttgtgaaagaggacaataattcctacttctcaagattgttttcaagataaagtaacattagcattgtacaatg

SEQ ID NO: 2386 - protein, 380 aa, Homo sapien
MNPCGWLGAVGPTLPNFPKWAASLLEPRVLPWQAQVAHPVSGGPSPWISRPDTAQLDGTMAPAFLLLLLLWPQGCVSGPSADSVYTKVRLLEGETLSVQCSYKGYKNRVEGKVWCKIKKKKCEPGFARVWVKGPRYLLQDDAQAKVVNITMVALKLQDSGRYWCMRNTSGILYPLMGFQLDVSPAPQTERNIPFTHLDNILKGGTVTTGQAPTSGPDAPFTTGVMVFTPGLITLPRLLASTRPASKTGYSFTATSTTSQGPRRTMGSQTVTASPSNARDSSAGPESISTKSGDLSTRSPTTGLCLTSRSLLNRLPSMPSIRHQDVYSTVLGVVLTLLVLMLIMVYGFWKKRHMASYSMCSDPSTRDPPGRPEPYVEVYLI

SEQ ID NO: 2387 - DNA, 2333 bp, Homo sapien
cgactctgaggtgcattctttttttgatgagaggcatctctaggtaccatccctgacctggtcctcatgctgccgaggctgttgctgttgatctgtgctccactctgtgaacctgccgagctgtttttgatagccagcccctcccatcccacagaggggagcccagtgaccctgacgtgtaagatgccctttctacagagttcagatgcccagttccagttctgctttttcagagacacccgggccttgggcccaggctggagcagctcccccaagctccagatcgctgccatgtggaaagaagacacagggtcatactggtgcgaggcacagacaatggcgtccaaagtcttgaggagcaggagatcccagataaatgtgcacagggtccctgtcgctgatgtgagcttggagactcagcccccaggaggacaggtgatggagggagacaggctggtcctcatctgctcagttgctatgggcacaggagacatcaccttcctttggtacaaaggggctgtaggtttaaaccttcagtcaaagacccagcgttcactgacagcagagtatgagattccttcagtgagggagagtgatgctgagcaatattactgtgtagctgaaaatggctatggtcccagccccagtgggctggtgagcatcactgtcagaatcccggtgtctcgcccaatcctcatgctcagggctcccagggcccaggctgcagtggaggatgtgctggagcttcactgtgaggccctgagaggctctcctccgatcctgtactggttttatcacgaggatatcaccctggggagcaggtcggccccctctggaggaggagcctccttcaacctttccctgactgaagaacattctggaaactactcctgtgaggccaacaatggcctgggggcccagcgcagtgaggcggtgacactcaacttcacagtgcctactggggccagaagcaatcatcttacctcaggagtcattgaggggctgctcagcacccttggtccagccaccgtggccttattattttgctacggcctcaaaagaaaaataggaagacgttcagccagggatccactcaggagccttcccagccctctaccccaagagttcacctacctcaactcacctaccccagggcagctacagcctatatatgaaaatgtgaatgttgtaagtggggatgaggtttattcactggcgtactataaccagccggagcaggaatcagtagcagcagaaaccctggggacacatatggaggacaaggtttccttagacatctattccaggctgaggaaagcaaacattacagatgtggactatgaagatgctatgtaaggttatggaagattctgctctttgaaaaccatccatgaccccaagcctcaggcctgatatgttcttcagagatcctggggcattagctttccagtatacctcttctggatgccattctccatggcactattccttcatctactgtgaagtgaagttggcgcagccctgaagaaactacctaggagaactaatagacacaggagtgacagggactttgttatcagaaccagattcctgccggctcctttgaaaacaggtcatattgtgctcttctgtttacaagaggaaacaagatggaataaaagaaattgggatcttgggttggagggacagtgaagcttagagcacatgaactcaaggttagtgactctgcaggacttcacagagagagctgtgcccatcattcagtccaagtgctttctctgcccagacagcacagaactccagccccgctacttacatggatcatcgagtttccacctaaaatatgattctatttattttgagtcactgttaccaaattagaactaaaacaaagttacataaaaagttattgtgactccacttaattttagtgacgtatttttgtatatataggccaacctataccacatccaaaattatgtatctattacagcccctagaagctttataaatacagtgtgtcttcttttattcacaaaatttttgaaatcgtggtaatatggtttgaaacctgtatcttaattattttttttttaaattgagacagggtctcactctgtcactcaatctggaatgcagtggcacaatcttgcctcactgcaacgcctgcctctcaggctcaagcaaacctctcacctcagcctgctgagtagctgggactacaggcacatgccaccaaacttggccattttttgtcttacgtagagacaagatttcaccgttttgcccaggctggtctcaaactcctgggctcaagcaatgtattgaatttt

SEQ ID NO: 2388 - protein, 429 aa, Homo sapien
MLPRLLLLICAPLCEPAELFLIASPSHPTEGSPVTLTCKMPFLQSSDAQFQFCFFRDTRALGPGWSSSPKLQIAAMWKEDTGSYWCEAQTMASKVLRSRRSQINVHRVPVADVSLETQPPGGQVMEGDRLVLICSVAMGTGDITFLWYKGAVGLNLQSKTQRSLTAEYEIPSVRESDAEQYYCVAENGYGPSPSGLVSITVRIPVSRPILMLRAPRAQAAVEDVLELHCEALRGSPPILYWFYHEDITLGSRSAPSGGGASFNLSLTEEHSGNYSCEANNGLGAQRSEAVTLNFTVPTGARSNHLTSGVIEGLLSTLGPATVALLFCYGLKRKIGRRSARDPLRSLPSPLPQEFTYLNSPTPGQLQPIYENVNVVSGDEVYSLAYYNQPEQESVAAETLGTHMEDKVSLDIYSRLRKANITDVDYEDAM

SEQ ID NO: 2389 - DNA, 2040 bp, Homo sapien
gccggagttcgtggggctgtggctgggcctggccaaggcgggcatggaggccgcgctgctcaacgtgaacctgcggcgcgagcccctggccttctgcctgggcacctcgggcgctaaggccctgatctttggaggagaaatggtggcggcggtggccgaagtgagcgggcatctggggaaaagtttgatcaagttctgctctggagacttggggcccgagggcatcttgccggacacccacctcctggacccgctgctgaaggaggcctctactgcccccttggcacagatccccagcaagggcatggacgatcgtcttttctacatctacacgtcggggaccaccgggctgcccaaggctgccattgtcgtgcacagcaggtactaccgcatggcagccttcggccaccacgcctaccgcatgcaggcggctgacgtgctctatgactgcctgcccctgtaccactcggcaggaaacatcatcggcgtggggcagtgtctcatctatgggctgacagtcgtcctccgcaagaaattctcggccagccgcttctgggacgactgcatcaagtacaactgtacctggcacggcccatcctggactgagaaactggaacctcagaggaacccgtgcctctctgctgccttggtgcccctgtgtctgcctcctctccctgcttttcagcctctgtctccttccatccctgtccctgtctggccttaactcttccctctttttcttttctttctttctttcttttttttttaagatagagtctcactctgctgcccgggctagagtgcagtggtgggatctcggctcactgcaacctctgcctcctggggttcaagtgatcctcccacctcagcctcctgagtagctgggattacaggcacccgccaccacgtccagctaatttttatatttttagtagagacggggtttcaccatgttggtcaggctggtcttgaactcctgacctcaggtgatccgctggcctcggcctcccagagtgctgggattataggcgtgagcctctggcccggcctttcctttttcctctcctctcctgccgagagtggaacacacgtgtcctgggagctgcatcttgtgtagggtccagctgcttttggggactgcaggaatcatctcccctgggccctggactcggactggggcctccccacctccctctcggctgtgccttacggagccccaatccaggcctcctgtggctgttgggttccagatgctgcagctccatgtgacttccaagcaggccctccgccctccctgctgaatggaggagccgggggtcccccaggccaactggaaaatctcccaggctaggccaattgccttttgcacttccccgttcctgtcacatttccccagccccaccttcccctcctgatgccctgaaagcttccggaattgactgtgaccacttggatgtcaccactgtcagcccctgccttgatgtccccatttagccatctccatggagctcctgctggagggccctgaaccctgcactgcgtggctgcccagccagctgcctcctgtcctgggaggaggcctcctgggtgtcctcatctggtgtgtctactggagggtcccacaggagaggcagcagaggggtcaggggaggtctcctgccgggggttggcctctcaagcctcaggggttctagcctgttgaatataccccacctggtggtggcccctccgatgtccccactgatggctctgacaccgtgttggtggcgatgtcccagaaaatcccaccaggacggcccagacatccctactggcttcgctggtggctcatctcgaacatccacgccagcctttctggggccggccacccaggccgcctgtccgtctgtcctccctccagcagcaccccctggcccctggagtggtggggccatggcaagagacaccgtggcgtctcatgtgaactttcctgggcactgtggttttatttcctaattgatttaagaaataaacctgaagaccgtcaaaaaaaaaaaaaaa

SEQ ID NO: 2390 - DNA, 1729 bp, Homo sapien
gccggaaccaatgtgccctgggccactgggccgtgagcagccaccgactgggggcaacttggcacttagaaccgcagcagggacgtcggtttgctatcgggactcggcgaggacgatggaaatcctgtatgaatgtggaagccattagcagagtaattgctgtctgttaccatgacaaccagccgctgcagtcacctgcccgaagtcctgccagactgcaccagctcagctgcacccgtggtgaagacggtggaggattgtggcagcctagtgaatgggcagccgcagtatgtcatgcaagtttcagccaaggacgggcagctgctgtcaacagtagtgcggactcttgccacccagagccccttcaatgaccggccgatgtgcaggatctgccacgagggcagcagccaagaggacttgctctctccatgtgaatgtacagggaccttggggacaattcatcggagctgcctggagcactggctgtcatcctcaaacaccagctactgtgaactctgccacttcaggtttgcagtcgagcgcaaacccaggccgttagtggagtggctgagaaaccctggcccccagcatgagaagcggactctgtttggcgacatggtgtgcttcttgtttataactcccctggccaccatctcgggctggctgtgcctgcggggcgccgtggaccacctgcactttagtagtcggctggaagccgtcggactgattgcactcactgtcgcactcttcactatttacctcttttggacactagtgtcatttaggtaccactgtcgattgtacaacgagtggcgtcggaccaatcagagggtgattctcctcattccaaagtctgtcaatgtaccttctaaccagccgtccttgctgggcctccattcggtcaagaggaactcaaaggagacagttgtttgatgtttgtatggttggttggttgtttgattcattgtttggggtttggaagtgtctgcactggggtcatgcactgagcgacccccaagcccttccttaagcctgtgggtctaagaacatccagagcatattagcacatcactccaagcaacaacctccgccagaagaaagcaaatgctgttttacttcaaatgatggatgctgcaatcatatgatatttgctaagctgccaaacatgtttatttagcagatactgtatggaattttctgaacacctctttaacgtatgaggaaggttgtcctgctacggatgcaattcaattcttccttttttattactatttcaaacacacacacatatatatatatatatattaaacttagatgataatcaaaatcaaaaagtcaacgtaaaaactggtttcttggtttggttgggtcttatttgagttagtttgtttctcagtttctcgtatggattctttggggtactttggtagcctgagtggtctttttcatctctttcgcgtccattactcaaggagacagcataacagatgcagaacaagtcatatttgaagaatgttttgtactaaacttcatttaattattcagtttttaaagggaaaaagggcgtgagctcacacagtgagctgtttatttaaatatcattaaggagaaaaaaaaatatggtgagaagctcgctcctttcaacttgtttggtactgacagctgatagaagctattttctaataataaacatccagtgtgtgaaagacaaaaaaaaaaaaaaaaaaaa

SEQ ID NO: 2391 - protein, 253 aa, Homo sapien
MTTSRCSHLPEVLPDCTSSAAPVVKTVEDCGSLVNGQPQYVMQVSAKDGQLLSTVVRTLATQSPFNDRPMCRICHEGSSQEDLLSPCECTGTLGTIHRSCLEHWLSSSNTSYCELCHFRFAVERKPRPLVEWLRNPGPQHEKRTLFGDMVCFLFITPLATISGWLCLRGAVDHLHFSSRLEAVGLIALTVALFTIYLFWTLVSFRYHCRLYNEWRRTNQRVILLIPKSVNVPSNQPSLLGLHSVKRNSKETVV

SEQ ID NO: 2392 - DNA, 2207 bp, Homo sapien
  Unsure 1823-1854: Unknown base
tcggctcgcggctttctgattatgcagaacttaaatctatgcctcagtgacccatacagcattccagttcctatcacctactgtcttgtccctatacttgcagcagttgtccagggttattctttgtctgtattagaattttttttcaggttgcttaaggaatcttgcagatacttgtgacaaagaatcataaatgctgttgttaaactgaataatgaattgagtcccaaatgttcgtgctaattaatgctttttgagttggagatgaaatgagagtaatatcatcaagctgtggattaaagttatcctcaaagccccatcatctacaaaaagaataggacaggaactgcctttgtgcaggtgcaagaccatgttacttttgagcagtgagcttgagatgtctgggatacaaattgggttccctattaactactaatcattccttttttttctttcaccttcagccactcacaactgaccttcactactattacatcctggagctgtcgttttattggtctttgatgttttctcagttcactgatatcaaaagaaaggactttggcattatgttcctgcaccaccttgtatctattttcttgattaccttttcatatgtcaacaatatggcccgagtaggaacgctggtcctttgtcttcatgattcagctgatgctcttctggaggctgccaaaatggcaaattatgccaagtttcagaaaatgtgtgatctcctgtttgttatgtttgccgtggtttttatcaccacacgactgggtatatttcctctctgggtgttaaataccacattatttgaaagctgggagatcgttggaccttacccttcctggtgggtttttaacctactgctattgctagtacaagggttgaactgcttctggtcttacttgattgtgaaaatagcttgcaaagctgtttcaagaggcaaggtgtccaaggatgatcgaagtgatattgagtctagctcagatgaggaggactcagaacctccgggaaagaatccccacactgcgacaaccaccaatgggaccagtggtaccaacgggtatctcctgactggctcctgctccatggatgattaattactcaaaactacaagtcccaagcaaagtgaactatttgttcctggaagtatttaataagttgcaaatgcagttcctttcataatatctcagcaccagaaacaaaaattaagattatcaaagcattttgaatagtgcactgccatgtgtcctgtctgtgaatgaagaagaattaccattctctctttgtaggcatgctgtatgtaattgacacaagggaacagtatttgcatttgtactgtcttagaatattatttatttttttgtatttgtaaatctgtggacaaaagagggtttcctcactccttttactcactgggctcatgacagtgaaggagatgctccatctgcttctccccctttctcttgctgtagtccaatgtgctatgagcatcagcttactttgtcacttagagcaagcaaaacccagtgcaagagtctcgttcagctctaaataggtttgctttcttttagttacagtgcccattttgaaattgcctatacagtcttagtgaccatttaaaccggacgaactaggtgtttaattttcactcttcatgttcaattagcagttcaaattaaagaagatggttattggagaacttttttgaatggttttgtattaaattgctttgaaatagatttcatttcttgtgcacacagccaagatttcttcaatgggtgtgagctagttgagggttaaccttgtaggttgcagannnnnnnnnnnnnnnnnnnnnnnnnnnnnnnngatgaggtcagtgctctgattttgaaggaggatattcactgaagctcatagttataaacaaggaaatcactgttaagaatgggaatttgtcctgtgttctgggaataacataaagagagcaactgatttcagccaggttttgccactaccctataattagtgcagtcttatgttataaaagaaagaagttaactatatttggggacaaaaaaatatttcaagagttgataaagattacctgtgcagtgcagagcactttaatgcaaccagctttcaagaaaaagccctatctagtacttgatgttgatgtttttattttgctgagcaaaataaagccaatgggagaaggacaa

SEQ ID NO: 2393 - protein, 192 aa, Homo sapien [sequence omitted]

SEQ ID NO: 2394 - DNA, 1855 bp, Homo sapien
aattttatttaaaaattttttaaaagaatttggttttggattaaaaggcatgcaagcagcattaattccactcacagttacagtctatcacctggggcattcactacttttcagagtcagatcacagttcaaaagacagctctcaccttgggggcatattccccaagtcagtgtgaacatgtcttgtcccaagaggacactttatacgcatggatgttcacaaatttattctaaactgcaggtgtctgtcaggattcatttgttaaacatgtcctctgtgttaaaaatcctaaaatccttttgcatttcttagaaaaaatcacgtttctgatgaaattctaaagatgtttgcaatattaaactagaatatattaacatgtataattttgagacaaggtcttgctctgtcacccaggctggagtacagtggctcgatcataactcactgccacctcacgatcctcttgcctcagccctccgagtggctgggactgcaggcgtgtaccaccatgcctggctagttttatttttagtacatagccttgaacaactgagcttaagcgatcatcctccctcaaccttccaaagtgctgggactgtaggcatgagccactgcacctggcctgaaattacattgttacaggcacgtaagtaacacttcctggatccaaaaatgtgtattctgcatttcaacaactgaacttaagcgatcatcctccctcaaccttccaaagtgctaggactgtaggcatgagccactgcacctggcctaaaattacattgttacaggcacgtaagtaacacttcctggatccaaaaatgtgtattctgcatttcaacaactgaacttaagcgatcatcctccctcaaccttccaaagtgctaggactgtaggcatgagccactgcacctggcctaaaattacattgttacaggcacgtaagtaacacttcctggatccaaaaatgtgtattctgcatttcatattaaaataaaaaagcaagtgcttgggatacaaatatctgcatgaaaatttaaagactttattcctgactggtatcacttttagtaagcagttgaacataacttgtagtgtgaatatggctaaaacaaaggacacctgatgtctgtgaagtctgctaaggacaggtacaaaatttatgcattgctttttaaaaagtttaaaatgaggaatgcttttgataatcagaaagactaatgtaaagtgctgactgatgtcctgtctgcagttaaggaagacacccaactctcttcttcctcatcatggtattctctatgtatagatctctaaaaatgcaaacttcctatggacaagacaatatgatttgctataatatgaattaagatatggtaatatctaatagtctccactgctaggattctgagtaacacaaaaaataggttttataaaaagcccatgcacttcaattggtgggggaaaagaataaagtcattttcagtcgactgactctgtaaaacagattaccaatataacaagctatgttatctaaattgccctggcagtcttcagttttctctaagtaaacaaagtaaaaggaacaataaggatgcaggcgtagtaatagctgtggaaaagatgaaactacagccacagtgacctgtgggcagcctgcgtagagataagctgaggtgtcagtcagactgatcctggtaacgatactccatggctgcatgaagatgctggaggcatcaagtgggtggccttaactctagtggattcactaggcaatgtaaattggttagtgggttcccgtaagtgcctgtaacaataaaatttctttttcaatgtccccaaaaaaaaaaaaaaaaaaaa

SEQ ID NO: 2395 - DNA, 7136 bp, Homo sapien
gcttatattttttccagctcccaaattccctttattccactttagtcccttcattttcagagatgaggaaacagattgctttgttcaaagacagctagaactagaacacaggctaatacttgctagccatgtgatatactaatgtcagccaaatacgggcatttacactttcagatgtttgccatatctgtgcacttactaattctgtttaatacaatttaaattgactcctttaaataagcttattttaaaggaaattttttgctactataaatagaaaaccattatatcctttaaatagtaactctaaataggaattcaaaacaaagcaacgttattaaaatttaatttaaaattaatttaaatttaattgttattaaatttttaattattgctgttcttcgtcagaaatgtgtcaaagcattgttttcatgtttgatgtcagttccttaattgtctaaacagaaaaagcacagctaatgcctctagttaagcttctgtataacttttttaaatgaaatgcttcttagaggggaaatgagagggcatgaatacatgtttatatactaaagtatgatttcatgtatatcagaagatcttattatatggaaccaaaattattctttggttgatttaattgttcttgaaacttcagtttttaccttgaaggttttagttagcttagcataagtttatttttctaaataaggaatctgattgcctcacaactcagatgtatcacagttatggtgaaatagcaatatattggtttctgtaaccttttaaataccgtaatgaattaaaatctcttcagcaaaagcaaatatatctagggtgacgagaggtgtttttagtgtatttgaatgatggaaatgtttttcttaaaatatttctgaagcattttttaaaataattttttgaatttattgatgatagtagttgtgtgttagtgtgaatgactggtctaaatgtgtatgtcacttccaagggattagtaggggtcagaatgatttgttttattcattgacttttcctttgacgtgttcttattcattgggctacatacattccctgttgccttctcaccaaaagtgccactacacaggctgtatttcattgtactgtagaaaaagacaagtagacctttttcattcatgagattcctatgaaatctgttggtggaggtataaaatgaggagacttttatgggctagctagtaggagttttgctgtgaaacctttgtaacaggtctatcaggaactagggagagaaataaatgcaggaaatacttgatcccattaaactgaggatgaaaaagacatgataatattttggggattatttattgtgtgattttccggctgatcagaagtgttaattttttgttatacttgtgtcaaatacatatatatatatatattttgaaatggagtcttgctctgtcacccaggctggagtgcagtggtgcgatctgggttcactgcaacctctgcctccaggttcaagtgatcctcctgcctcagcctcccgagtagctaggactacaggcacgtgccaccacgccctgctaatttttgtattcttagtggagatggggtttcaccatgttggccaggctggtcttgaactcctgacctcaagtgatcttcccaccttggcctttctgaactatttcctttacacacatttagaactacatctaactgtattatagttttcactttcaccatcagacaaaattcagaagattcaagagaaggaaagtcgattgtatttactcatatttttgctaccgtgtttttacatctcatattttaaggctctcttaattatttattttctgtttagttaatttcctctagccattctttatttatagtgggtctgctggtaacaaattctctcaatttttcctcgtctgagaatgtcttgacttcccttccatttttgtcagcacctgaaaaatactatgccactatcttctgggttctgtggtttctgatgagaactccactgtcagtctaattgtcgttataaatgcagtgttctctctctctctctgcttccaggatattttttcttttttttttttttttttttcttgagacggagtctcactctgtcgcccaggctggagtgcagtggcgcaattttggctcactgcaagctctgcctcccgggttcaagcgattactcccactttagcctcccaagtagctaggactacaaggcacaccaccatgcctggctaatttttgtatttttagtagagacggggtttcaccatgttgcccaggctggtctcgaactcctgacatcaagtgatcttcctgcctccgcttcccaaagtgctggaattacaggcgtgagccactgctcccagcctctttattttttcagctttactctttcttctgtctttttgacatgtgtgtccagtgacacacgtgttagattttgctatagtctcacgcacgggtctataaggctctgttttttgtttcattttgtttttcctattttctctctattcagatcgagtaatttccactgttcagttttatcatagctgcttttaaatctttgtcaggtaattctgtcatctaagttttggcacctattgattatcttttgcattgtttttgtttttgtttctgtttttgttttgagatggagtcttgctctgttgcccaggttggagtgcagtggcactgatctcggctcactgcaacctcctcctcccgggttcaagtggttctcctgcctcaacctccttagtagctgggattacaggcatgtgccaccacgcccggctaattttgtatttttagtagagaccaggtttatccatgttggtcaggctggtctcaaactcccaacctcaagtgatccgcctgcctcgacctcccaaagtgctgggattacaggcgtgaaccactgcacccagcctatcttttgcattgttttaaatcttgttcttgctaggatgaatgattttctgttaaaactagatattttcatattatgttcctaggctctggatattatctaaaccttctgtttccactggcttttattgacactgctttggcaaggtcatagggggtgcctcattactgccaggtggacatagaagtcaagggtccctactcagcctctactgatgcctcaggaagaggatccttcttgttattgctgggtgggggtggaagtctagctgacacctactgaggtaggtgctggggcatgcccggccatcagggtgaaagtcctggctccctagttggcctacttttacattgccctaatagggcattggagctcctcactatggtttatgagctggaagtcaaggctcctcacttagctttcgttggtgtgggtggtggtggggcaaaactgttttctgggtttggctggagtggagcagttactgtcaaaagttttctgtcttgccaggctgtccctttcttgtttctttggctagagagagcaagcttttgttgtggctctttttgtctgtgccagttggcatttccaggttgctgccttctttagctccaagtctgggatatattaggcaaaaagaaaacccagagaatttacaccaccgtgtcattccatgggtcctgaggtcccttacttagtctgccttctctccacttttcacagtcttctcatgttttgtatataatgtccagggtctttagttatacttagcagaaataaaagggaaaagtatgtctgctctatgcttctgtaagtggaagtcttcaaatttgcatttttgattcctttaaacagttttgtaaaatatataatcattattgggcaaaatgtcccataaaatgtatataccttgtgatggtttgcataatattgtgttcaagaggactgctgaaaaataacatctttatttaaactgaaacgaattgttcacattattaatgaaaacttttcccctctaggaaataatgcaaaaggtgtcccaaggctcctgaccagtgaacaaagatttgagaaagacagccaagctcatgttttctcctgatcaagaaaatcatccatctaaagcaccagtaaaatatggtgaactcattgtcttaggctataatgggtctctcccaaatggcgatagaggaaggaggaaaagtaggtttgctttgtttaaaagacctaaggcaaatggggtgaagcccagcactgtgcatattgcttgtactcctcaggctgcaaaggcaataagcaacaaagaccagcatagcatatcatatactttgtctcgggcccagactgtggtggttgaatatactcatgacagcaacacagatatgtttcagattggccggtcgactgaaagccccattgattttgtagtaactgacacggttcctggaagtcaaagtaattctgatacacagtcagtacaaagcactatatcaagatttgcctgcagaatcatatgtgaacggaatcctccctttacagcacggatttatgctgcaggatttgactcatcaaaaaacatctttcttggggagaaggctgccaaatggaagacatcagatggacagatggatggcttgaccactaatggtgttcttgtgatgcatccacgcaatgggttcacagaagactccaagcctggaatatggagagaaatatcggtgtgtggaaatgtatttagcctacgtgaaaccagatcggctcagcagagaggaaaaatggtggaaattgaaaccaatcagttacaagatggctcgttaattgacctctgtggtgcaacattgttatggcgtactgcagaaggcctttcccacactcctaccgtgaagcatttagaagctttaagacaggaaatcaatgcagcacgacctcagtgccctgtagggttcaacacactagcatttcctagtatgaagaggaaagacgttgtagatgaaaaacaaccatgggtatatctaaactgcggccatgtacatggctatcataactggggaaacaaagaagaacgtgatggaaaagatcgtgaatgtcctatgtgtaggtctgttggtccctatgttcctctgtggcttggatgtgaagctggattttatgtggacgccggccctccaacccatgcgtttagcccgtgtgggcatgtgtgttcagaaaagacaactgcctattggtcccagatcccacttcctcatggtactcatacttttcatgcagcctgtcccttttgtgcacatcagttggctggtgaacaaggctacatcagacttatttttcaaggacctctagactaacagaccattgtcttgcaggactacattataaatttataagctaagtgagttgggttttcgaacctgttgtccacgtcacagtttttctgctctggtcatttgcattaagatgaagaattttttaaaacatttataataaatagtagcaatttctgagcaaaaatctgggaaactcaagcaaaggaatttctgaaagtatcagtcttctgaattctgagttttgaaaatatattttgaggagaaaaagacatagtctaatttgatgccttccttttagtgtttttgaatcacctatcctcagtgctgaaattgttttgtataactgagggtactgttggttcaaactatgttagtttacagtttgttgcaaacattgtaaaatacagcgacatgtatattaacttttttctatttatctttattatagaaaataccttagaatgttcttgatagagtagcatggtaacgatggtgtcacacccttggtgtgaatggtagcttagtgagcaacctagctcaaggatttgcaaagttaggaagaaggacgagagagcctctctccccaccccaatctaaatatggaatttggtaaattagaatactttgtaatttgtaagaccaaattcatactaattacccgcgtgaaaggtgtttgtttttaacaacattgaagataatcaggaaagattttttcttaatgtttctctcgagcgtagtactataacaaaaacttaatgctaagaaacattttatatgctcctttggatatgcaatttaatctagattatctatttttctcccatgataactaatctgtttttagtatcagcagcatttggcaagtttattttttggatataaactgtggttcatctgttcactgtttctagaaaaaaatcattgccataagaaaaagtataaattagcaagaaaggagagtgacttgatttgcttttggaaaaagaaatgcttaattaattattctgtatttggccttattcgggcattaggaaatctagagatctaaagggttgaatgacaatagtgcccccgtttttagcagaccagccttaactctgggtttgaatcctaaggagattgccacagtgagacttaaggaaatgtttggttggcagatgagcaccaatgactgcagcgtggagtgacgcactgcatggtctgtttattctctaattccaatatgtcttttgcttccagaagcaagaaaagtttcttctctcccctccttcccacccttttttcaaaggcaccacaagtatagacagttgcactacatcaaatctttttttgacacttgtagaaaccagtacacttttagattagacagtatcttcttttaatattttgatttgttttcctttagtttgaaaagttgtataatacttaactgactgtagcaaagttttatatgtggtagcatacctttaatttatcctattacaaaactgttctgaattttcttttggtttttaaaaaacaaaacttgttgcttagaagccatgaattattttattttacttcaactgtcgaaacttccttgttttaaaaaatgatcatttgggttcactcaggaaatgcatgtcaggaaacttgtattataagtttattagttgtgatgtatcagtaactgctgttacccctttttcaaagaaatgtaattgattttgaagttttctagattgtcacatgctttgtgactaatgcaagaaagcaagtcctgtgttgtatttgttctagtcatttttattcaggctatatattgtagcttaatttttatttgcaattaatttatttaaactaagtaaatacttttcaaaata

SEQ ID NO: 2396 - protein, 418 aa, Homo sapien
MFSPDQENHPSKAPVKYGELIVLGYNGSLPNGDRGRRKSRFALFKRPKANGVKPSTVHIACTPQAAKAISNKDQHSISYTLSRAQTVVVEYTHDSNTDMFQIGRSTESPIDFVVTDTVPGSQSNSDTQSVQSTISRFACRIICERNPPFTARIYAAGFDSSKNIFLGEKAAKWKTSDGQMDGLTTNGVLVMHPRNGFTEDSKPGIWREISVCGNVFSLRETRSAQQRGKMVEIETNQLQDGSLIDLCGATLLWRTAEGLSHTPTVKHLEALRQEINAARPQCPVGFNTLAFPSMKRKDVVDEKQPWVYLNCGHVHGYHNWGNKEERDGKDRECPMCRSVGPYVPLWLGCEAGFYVDAGPPTHAFSPCGHVCSEKTTAYWSQIPLPHGTHTFHAACPFCAHQLAGEQGYIRLIFQGPLD

SEQ ID NO: 2397 - DNA, 2163 bp, Homo sapien
ctaatcttccagttgccccctattgactttaaaccaaagctttgattcatgaccactgggatccagccagcgggggatttcttttcctgatggactgtacccaggatctcacatttgcttaagcagctcccacaattgggttcttataaaaggacacagaagagacaagctcagttttctctgaaggagaaggactgcacttagaactgcattttggtgacctctgaaattcagtacggcagtgaatgagcttctgaccttgaggtgaacttaacaaaattatttttggaaaaatcgttgtgggaaccattaaaagaactccaggaaacatgaattctggaatcttacaggtctttcagggggaactcatctgccccctgtgcatgaactacttcatagacccggtcaccatagactgtgggcacagcttttgcaggccttgtttctacctcaactggcaagacatcccatttcttgtccagtgctctgaatgcacaaagtcaaccgagcagataaacctcaaaaccaacattcatttgaagaagatggcttctcttgccagaaaagtcagtctctggctattcctgagctctgaggagcaaatgtgtggcactcacagggagacaaagaagatattctgtgaagtggacaggagcctgctctgtttgctgtgctccagctctcaggagcaccggtatcacagacaccgtcccattgagtgggctgctgaggaacaccgggagaagcttttacagaaaatgcagtctttgtgggaaaaagcttgtgaaaatcacagaaacctgaatgtggaaaccaccagaaccagatgctggaaggattatgtgaatttaaggctagaagcaattagagctgagtatcagaagatgcctgcatttcatcatgaagaagaaaaacataatttggagatgctgaaaaagaaggggaaagaaatttttcatcgacttcatttaagtaaagccaaaatggctcataggatggagattttaagaggaatgtatgaggagctgaacgaaatgtgccataaaccagatgtggagctacttcaggcttttggagacatattacacaggagtgagtccgtgctgctgcacatgccccagcctctgaatccagagctcagtgcagggcccatcactggactgagggacaggctcaaccaattccgagtgcatattactctgcatcatgaagaagccaacaatgatatctttctgtatgaaattttgagaagcatgtgtattggatgtgaccatcaagatgtaccctatttcactgcaacacctagaagttttcttgcatggggtgttcagactttcacctcgggcaaatattactgggaggtccatgtaggggactcctggaattgggcttttggtgtctgtaatatgtatcggaaagagaagaatcagaatgagaagatagatggaaaggcgggactctttcttcttgggtgtgttaagaatgacattcaatgcagtctctttaccacctccccacttatgctgcaatatatcccaaaacctaccagccgagtaggattattcctggattgtgaggctaagactgtgagctttgttgatgttaatcaaagctccctaatatacaccatccctaattgctctttctcacctcctctcaggcctatcttttgctgtattcacttctgaccagagacaaatcagaaatgtgttcacatgctgtgggaacccctttatcccaggaagtcctcttccttgtgccttaacatacaggacaaataggctctattttatgtcttgaattgccttctaatgttatcaaaactcatttattgtgttactattaaatatgctgaaaacgctaaaagtatacgtattggttctttattaaataatttttgaaaaatcattattcatgatcatggcatacagtatattctcttttttttctttatttatgactgtcactgagtgaaataatagatgacagacatgtctgaatgaagtaaaaatcaatggaagacagtcgggatcttttgcttcatgcaaaaaacttggagtgaagtctcaatgataactgggaaatgtttttcttcctctttatctaactatattacacttatccatcaggtttcattgtattaatctatcctttgaggtaata

SEQ ID NO: 2398 - protein, 452 aa, Homo sapien
MNSGILQVFQGELICPLCMNYFIDPVTIDCGHSFCRPCFYLNWQDIPFLVQCSECTKSTEQINLKTNIHLKKMASLARKVSLWLFLSSEEQMCGTHRETKKIFCEVDRSLLCLLCSSSQEHRYHRHRPIEWAAEEHREKLLQKMQSLWEKACENHRNLNVETTRTRCWKDYVNLRLEAIRAEYQKMPAFHHEEEKHNLEMLKKKGKEIFHRLHLSKAKMAHRMEILRGMYEELNEMCHKPDVELLQAFGDILHRSESVLLHMPQPLNPELSAGPITGLRDRLNQFRVHITLHHEEANNDIFLYEILRSMCIGCDHQDVPYFTATPRSFLAWGVQTFTSGKYYWEVHVGDSWNWAFGVCNMYRKEKNQNEKIDGKAGLFLLGCVKNDIQCSLFTTSPLMLQYIPKPTSRVGLFLDCEAKTVSFVDVNQSSLIYTIPNCSFSPPLRPIFCCIHF

SEQ ID NO: 2399 - DNA, 357 bp, Homo sapien
gaagtgcagctggtggagtctgggggaggcttggtacagcctggcaggtccctgagactctcctgtgcagcctctggattcacctttgatgattatgccatgcactgggtccggcaagctccagggaagggcctggagtgggtctcaggtattagttggaatagtggtagcataggctatgcggactctgtgaagggccgattcaccatctccagagacaacgccaagaactccctgtatctgcaaatgaacagtctgagagctgaggacacggccttgtattactgtgcaaaagatactgaattaatcctctttcgcgattccataacccgccaattacagactcgaattgactac

SEQ ID NO: 2400 - DNA, 554 bp, Homo sapien
tttcctttcacacagcagcatcatttatctggtagtagcaagacagccgtatgactttttgttgttgttaaagaaaaataagttgtcaagatttgcctaccaataactttcctatgtcttggctttcatgtccagtgggctagtttccaactgtttgagactcagggtaatcccagaaacctgtgaagcatcggcacaaaggttgtagcgcagatgccaacagatgtgtaggtaacaaacttgtaaggcacttcaatctccagtctccgcctggcctccttgttcctggtgaccaccttgaaccatgagtataatacttgcagtgagagattttgtacaagctgacgaaccaagaggatcaacacaattcccactgcaaatttggtcagacccaaaactaacatgtaggtggtgagcggtgggatgttctgaataacagggagagattcagcgggcttggatacaagctggaagaaatggttgatccagaatcctatggtcactccagccccggcagccagaatggtggtggtgtccgcccgggttgggctgta

SEQ ID NO: 2401 - DNA, 2698 bp, Homo sapien
aacgttaaatttagatgttttacctctaaatgaggtgaaattgcaggttccctctggctggcggtggggaggagacgcagggcagctttggccagcagtgagcggacagacttagcgggagtagactctgcttcctccagccacaccttggggacggaggcccaggacagtccccagtgtctgggagcatctggcttcctctccctgcacacaccagccgggtctgaacggcatcagttctaagtgccaggccagagagaggcagcgagggacacggagtagaagaggctgtcctgtctgccaccaaaggtgaccaccatgtcggtgaggttgcggttcctgtcccctggggacacaggggccgtgggggtcgtgggccggagcgcctccttcgcaggcttcagcagtgcacagagccggaggatcgcaaagtccatcaacaggaactccgtgagatcgcgaatgcctgcaaaatcctccaagatgtacggcacgctgcggaaggggtcggtctgtgcagacccgaagccccagcaggtgaagaagatcttcgaagcattgaaaagaggcctcaaggagtatctgtgtgtgcagcaggctgagctggaccacctgtctggacgccacaaagacaccaggaggaattccaggctggctttctattatgacctggacaagcaaacgcgctgtgtggaaaggcacattcggaagatggagtttcacatcagcaaggtggatgagctgtacgaggactactgcatccagtgccgcctgcgcgacggcgcctccagcatgcagcgggccttcgcccggtgccccccgagccgcgcagcccgagagagcctgcaggagctgggccgcagcctgcacgagtgcgccgaggacatgtggctcatcgagggggccctggaggttcacctgggcgagttccacatcaggatgaaaggcttggtgggctacgcacgcctctgtcccggagaccactatgaggtgctcatgcgtctgggccgccagcgttggaagctcaagggtcggatcgagtcagatgacagccagacctgggacgaagaggagaaggccttcatccccacgctgcatgagaacctggacatcaaggtgacggagttgcggggcctgggctcgctggctgtgggtgcagtgacgtgtgacatcgccgacttcttcacgacgcggccgcaggtcatcgtggtggacatcacggagttgggtaccatcaagctgcagctggaggtgcagtggaacccgtttgatactgagagcttcctggtgtcacccagccccacgggcaagttttctatgggcagcaggaagggctccttgtacaactggacacccccgagcacccccagcttccgggagagatactacctgtctgtcctacagcagccaacacagcaggccttgctgctgggtggcccaagggccacctccatcctcagctacctgtctgacagcgacctccggggtcccagcctaagaagccagagtcaggagctgcctgagatggactccttcagctctgaggacccccgagacacggagaccagcacgtcggcgtccacctcagatgtgggcttcctgcccttgaccttcggtccccacgcctccattgaagaggaggctcgggaggaccccctgcccccaggtctcctgccagagatggcccacctctctggaggcccgtttgcagagcagcctggctggaggaacttaggaggggagagccccagcctgccacagggctccctgttccacagcggcacagcctcgagtagccagaacggccacgaggaaggggcaaccggggacagagaggacgggcctggcgtggccctcgaggggcctctgcaggaggtcctggagttgctgaggcccacggactccacccagccccagctccgggagctggagtaccaggtcctcggcttccgggaccggctgaagccctgcagagcacggcaggagctcacctcggccgagagcctgatagagtgcatcctggagagcttcgccttcctcaatgccgacttcgccccggatgagctgtccctgtttgggggctcccagggtctccggtgagtgcacctccttccagcagtgacccagtggccaccactcccaccgggtgacccgagctccacgtttcctgccagcctccccgtctgtttctcccactgtccttggctcagctcttgtcactctatcgtgcacccttccccatgccatccccgcacatcccccacttgcctcagagccggtcctcagagaccacgaagtgggtgagatcaccccagcctgcccctgagccttctgctccaaggaaccagcttttagtattattttttaaaccttaaaaataatcaccaagtatatagtagaagttctttgaggccaggcacagtggctcacgcctgtaatcccaacactttgggaggccgaggcaggcggattacctgaggtcaggagttcaagaccagcctggccaacatgatgaaaccccgtctctactaaaaatacaaaaattagctgggcatggtggcaagagcctgtaatctcagctactcaggaggctgaggcaggagaatcactcggacccgggaggcggaggttgcagtgagccaagatggcaccactacatttcagcctgggcgaaagtaagactctgtctcaaaaaaag

SEQ ID NO: 2402 - protein, 593 aa, Homo sapien
MSVRLRFLSPGDTGAVGVVGRSASFAGFSSAQSRRIAKSINRNSVRSRMPAKSSKMYGTLRKGSVCADPKPQQVKKIFEALKRGLKEYLCVQQAELDHLSGRHKDTRRNSRLAFYYDLDKQTRCVERHIRKMEFHISKVDELYEDYCIQCRLRDGASSMQRAFARCPPSRAARESLQELGRSLHECAEDMWLIEGALEVHLGEFHIRMKGLVGYARLCPGDHYEVLMRLGRQRWKLKGRIESDDSQTWDEEEKAFIPTLHENLDIKVTELRGLGSLAVGAVTCDIADFFTTRPQVIVVDITELGTIKLQLEVQWNPFDTESFLVSPSPTGKFSMGSRKGSLYNWTPPSTPSFRERYYLSVLQQPTQQALLLGGPRATSILSYLSDSDLRGPSLRSQSQELPEMDSFSSEDPRDTETSTSASTSDVGFLPLTFGPHASIEEEAREDPLPPGLLPEMAHLSGGPFAEQPGWRNLGGESPSLPQGSLFHSGTASSSQNGHEEGATGDREDGPGVALEGPLQEVLELLRPTDSTQPQLRELEYQVLGFRDRLKPCRARQELTSAESLIECILESFAFLNADFAPDELSLFGGSQGLR

SEQ ID NO: 2403 - DNA, 677 bp, Homo sapien
ggattagcaaaggctttagaaaactacaaaaaagactaatttgttgcctctggatgtgtgtgttattttgggctgttaatatacttgactgcttgtttcaaggactggaaccttttcttttacctttaagattcctgcattttcatgtgctcattcagctgggatttgtgtttcatagaactggtagtattggaggtagaggagatactgtgatatcatatctctctctctgtctgtctctctctctctctcccactgaagaagagaagacaaaatttagagaatttgagacttgctcaaagttgtgtagctagttagcgataaagctggaattgcaccagatttgatttccatgacattgctttagcctggtggttctcaaagcatggttattggaccagcagcatcccttgggaatttgttagatatgcaaattcatgagatccccattcccttatcagaaattttaatacgctgtgtagggtgattctaatgcctgctaaaacttgggaaccactactgtggtctttacactattgggcagggagatgggagactacaggtagatttgctgaatttcatgggcaacactaggttttcattttaccttattgttctgccatttagatgtctcctcttaaaacatttttacttgcagtgatggcttccttagactc

SEQ ID NO: 2404 - protein, 103 aa, Homo sapien
ISKGFRKLQKRLICCLWMCVLFWAVNILDCLFQGLEPFLLPLRFLHFHVLIQLGFVFHRTGSIGGRGDTVISYLSLCLSLSLSPTEEEKTKFREFETCSKLCS

SEQ ID NO: 2405 - DNA, 583 bp, Homo sapien
gttttggttgtgagtcttttaacttacataaaaatatggagaattagcatattcacatatctattttgtgatgtttatcatacggaagttttaaaatatagtaaattcagtctttccatttttttttgtttatttaagaaccattccctagctagggtcatgaatacattcttatgaattatagaatcccaactggatagctagtttccctagcacctttaaaaaatagtttattattttcctcctgatgtataaggccacctttaccaatttacatataatgtacggaaatgtttcttggctctgcattctgttaaattggtccatttatctaactttgcttagtaacccactgtttttatcattgtggtatcataattgattatcacaaatggtagaatgattgtcctcaaagtcttttctggtatatattgatataattgtatagcttttcttggtgtagtaaagtacacagttaaattttctaacattgaaatatcttttagattttcacttccagaatggcaatgtgaagggccctgtggacccactgtcctaggaattagctataactagtgaaaat

SEQ ID NO: 2406 - DNA, 1357 bp, Homo sapien
  Unsure 1313: Unknown base
  Unsure 1322: Unknown base
ttttttttggcttttaaaaagtaaatttattaccacacataataagctccagagagtagagagattccatcatgtcatcaagacccatgataaatctgttaaacattttggattttttttgaactgttacactctgttactctcaatatatgggtctcatactttggccaggttcctctgcagtgcctcaaaactctgtcccctggagcagaaaaaccggggctgtattttacccaagttggctctgcccttgcactttttcataattgtctcaggatttaggacaatagctgcaggtaggaaacagggagaaaagagcagttgtatatagtcccttgggtttcacagctcctcaaagaaacagagaattaattacatggtagatctaccctattactggatcccaagagggagccatcaccaggccgtctattattgctgctcctacgtcttgtaaccaatagcaagcatcctgttctcagacactaacttgggtttggagaccatgagtgttatggagacacgatgtcataaataataaagcttgggagaatgtggggcatcgatcccactaccttcttgcatgctaagcaagcggctctaccacttgagctaaattcccccacatcagggcagcattatttattggttagcgggtggcctggaaacacaggtgatttcagggccttcagcaggaaagcagggctcctaagagcagattttcttcacttgatgggcccagggcaaacagcagtggctactcattgtctgcaaagaaggaggagaaaagggaacaaggagaaagtcacaacgggaaaacttcacgctgccaaaatgccaagtttagagtattccgggacagaaaagggcacgtcctagcaaaggaggacctgcctagacatgcccagataactctatttgaaagccttgacactgcggatgagagatctctggagtgtgtgcaacccagtggtcaagtgaggactggaaagtgggccattgcacagttcaagctctcaggctctttttaggtaagttgttcgggattagagccacttattcacagctggcaggtgcgtccacaagctcatgaacaactttatggttttgctttctacagtatctgtccaggcacattctagttacttgacacatcttggtttcagtcctctcaccagaaagctggggctgtatttaaccaggtggctctgtcctccacttttcacaattgtctcacatttaggaccaagctgcaggcagaaacagggagaaaagagcagttttatatgtcctttggtttcacagctcctcgnagaaacagnaaattaattacacagtagatctacactatactgaa

SEQ ID NO: 2407 - DNA, 1448 bp, Homo sapien
  Unsure 1420: Unknown base
caaaattaaacttagactttttgaatttattagctgtttttgtgaagattaattttagaaagctaaaattaaacactgaaagtaagttactttattccatacggtctctgtccagttttagcactaaaatcagttcaaggatgccaatccctaattggccaaatagccttaccattcttgttttcttctccaaatttgtttttttgctggtcagataacttccaatctctaaaatattcctgaaatgataaatttttatgatacagcatagaataatatgtatgtggagacttgaaggagtcaaatctcaatgagccttttgtagggcttaacgattgttaaaagggggccaaaagggcactaatttttggaaagtgtatgtttgtttatggtggtgaatgtgtagagagggtgaaaagtaaaggaaaagtagaacaagaagaaagaaaactgataggtatgacgatgagagagaaagaaaatgggaagagagcgcaagacgtgcagatttagaaaaaaggttgagggaaacatattcaaaagggaaaaagaaagcagggggaaaatacattagaggtgttgaaattagtaggcactcacagaggtgctaatcgagagttctgttgggctcctgtcatgctgctattaaagagcattagcagctaagagatctaaattctagtcctagttctttgtgttgccgtggagaagtcagttaacttacatgaggctcaggttccttacctgtgtgtaaaatgggaacattgaactaggtgatctttaagatcccttccggctctaaaattgtttgacattatcttggtggtcagtaactgtgagaaacacattcctgaggaaaatttgcagctatagttgacttcaggacagcatgtttagggagtagaatgtaagctccctgagggtaggggccttttctgttgtgttcactgccatatccccagcagctagcacaatgcgtgttacatagtaggcattcattaaatgtttgttgaatgaatgatgtgaaaagtatgttgatggtttgttaggagcacacctagaaagcctcaaagaaaaatggtgtgctttagggagggaaaagacagatttcttctgaagaaatcttaagcaagctgatttttaatccttattcttccttattttgtcccagattcaaagaaagtggcttcagctagtgacattctcatagtcacaaaacttacggtgactgtagacatacataaaagtgtacatgtaatctaggccagttccctttaagtatcttacagaaaggcaggaccaagcttaggtctccatggaatctgagtgaaaagtatatacatggaatatattagttatattgaattagattgattggattaaaattcattcagttgagaggcacagttagtctacaagnctgagatacaggctgccaaatttaagat

SEQ ID NO: 2408 - protein, 71 aa, Homo sapien
KLNLDFLNLLAVFVKINFRKLKLNTESKLLYSIRSLSSFSTKISSRMPIPNWPNSLTILVFFSKFVFLLVR

SEQ ID NO: 2409 - DNA, 508 bp, Homo sapien
cttgagtacttttaatttgccatgcacaactttaaattctttttttctatatgtctcagacagaatagatggagtgtgcaaggatagatggtgaatatgtattttggtaaatttgtagagaaaacgaagaaaacatataattcactaaataatgataatatccaatgtctgttgggggcaaagagcctagaatggacaaaagtagtatgtaaatttagaagggtgggagatcagatttaaggcatcctgaggtcaaggtatatttggagaaaaaaaatactatttaaacttcgttcagaagaatgacgtagagttttaattaatcaattccaaacatgtagagggagaattaggatggggaagagaaaaagtacacccaaaggaggtaggaagggtgagtgtaaaacaggaaaggcagaatgaatagaaaggataaatagaaataagagagtggaaataaatccaaagaagtaaacaaaataaaggaaaaaaaaatctgagcatggtg

SEQ ID NO: 2410 - protein, 30 aa, Homo sapien
LSTFNLPCTTLNSFFLYVSDRIDGVCKDRW

SEQ ID NO: 2411 - DNA, 787 bp, Homo sapien
ctgggacatcttcatcctttttgtccccatgaccttccttatttatgctaatacatttgccttccctgagttcctctacactacctatctctcaaatggcagcagggtcaacatcaccatagtctgctattctttgataactccatttatgctctctttgaagttcacttctggcattatcacttttcatttctttgctgcatttttatctttgttggccagttccctcttttcgtgatacattgttgtaaaatctcatgggagttagccacctggagacagggaggcaacagaactacacactttgctgtctgtgcataaattgaagagcagaagctcagtgaccaatcactgatggactttgaaaggagtgacagtaattggccctcaattatgatgcttatcttttatttatgtcgtgatttctagactgaagagttagcaacaaagtttataccatatgcaactactcgtgatcaatataccaaggtactgaaaaagaaccatgtcactgggctactagtgttatttaactgaatcatgcagagtgagggctgcctgtattcttgcctttgttttctagaactgaagcatggagggtcaaataatgcatccaatgttatttagagctggaatttgaatccatgcagttgggtgcagagtctgagctcttaatcaccttgaccattacattaccttgcttttttatttcctttggggaaatgtttcctaaaaaatgtaacgccctctgtgctgctatgtgggaatcagaagtctcagtgctgat

SEQ ID NO: 2412 - protein, 78 aa, Homo sapien
WDIFILFVPMTFLIYANTFAFPEFLYTTYLSNGSRVNITIVCYSLITPFMLSLKFTSGIITFHFFAAFLSLLASSLFS

SEQ ID NO: 2413 - DNA, 546 bp, Homo sapien
cagccatggctttgctgcaatactctgggccattatcggttttggttttttctgggattcccataactgcaaagcaaaaaaaaggttttttaacatgagctgtagcttcccctgtttgatatgtggcccagataaaatgtgaataaatatctactgaaacatgaacaaaggacaattttccaaaagtgggaatgtgtgttatgtccatctgacagatggaatttggagatagacctctagggttaactcctgctccctgatgtggcagatgcaggacttcaccggcagaaaagtgttttacaatctccttaacctgcttccaggataagccgtatctttttctgaggcctgcagcattaagatgggttaagcaatggaacgtttgtgcatcggcaaaagctgcagaaaccagtgcatccgccctttgattaagttaaaaggaccagggaggttagtatgtgctctcatatgagtaatatagaaaggggaatgtctttgttgtactgcttgttgtaaagaatgaaataaaagattaagttgttcacc

SEQ ID NO: 2414 - DNA, 1167 bp, Homo sapien
acagccgaagggaaagcagcaggttggggcttcttgtggccaacttcagagcctgtcaccaggaaaggtaagcatgggaggaaggaagatggcgacagatgaagaaaatgtctatggtttagaagagaacgctcagtcccggcaggagtccacgcggaggctcatccttgttgggagaacaggggccgggaagagcgccactgggaacagcatcctgggccagagacggttcttctccaggctgggggccacgtctgtgaccagggcctgcaccacgggcagccgcaggtgggacaagtgccacgtggaagtcgtggacactccggacattttcagctcccaagtgtccaagacagatcctggctgtgaggagagaggtcactgctacctgctctcggcccccggaccccacgcgctgctcctggtgacccagttgggtcggttcaccgcccaggaccagcaggcggtgaggcaggtgagggacatgttcggggaggacgtcctaaaatggatggtcatcgtcttcaccaggaaggaggacctggccgggggctccctgcacgattacgtgagcaacacagagaaccgggccttgcgcgagctggtggccgagtgcgggggccgggtctgtgcctttgataaccgggccaccggccgggagcaggaagcccaggtggagcagctgctggggatggtcgagggcttggtgctggagcacaagggcgcccattactccaacgaggtgtatgagctggcgcaggtgctgcgctgggcaggccctgaggagcggctccggcgggtggcggagcgcgtggcagccagggtgcagaggaggccatggggcgcctggctgtcggcccggctgtggaagtggctgaagtcccccaggagctggaggctgggcctggccctgctgctggggggcgcgctcctgttctgggtgctgctccacaggcggtggtcggaggccgttgcggaggtcgggcctgactgacagcgcaggtcctaaaactgaaggcaacttggttaagggaggctgaattcttggagctgaagggaaaacttcattccaacggaaggaatcctgtagtttcaggcatagttttaatgacacagaaaactttgctgcatcacctttgcaactttgccaaagctcagagttcactt

SEQ ID NO: 2415 - protein, 306 aa, Homo sapien
MGGRKMATDEENVYGLEENAQSRQESTRRLILVGRTGAGKSATGNSILGQRRFFSRLGATSVTRACTTGSRRWDKCHVEVVDTPDIFSSQVSKTDPGCEERGHCYLLSAPGPHALLLVTQLGRFTAQDQQAVRQVRDMFGEDVLKWMVIVFTRKEDLAGGSLHDYVSNTENRALRELVAECGGRVCAFDNRATGREQEAQVEQLLGMVEGLVLEHKGAHYSNEVYELAQVLRWAGPEERLRRVAERVAARVQRRPWGAWLSARLWKWLKSPRSWRLGLALLLGGALLFWVLLHRRWSEAVAEVGPD

SEQ ID NO: 2416 - DNA, 1108 bp, Homo sapien
tttttttttttttgttaaacatataatttttttattttgagcgtgacacttctccactagatagcaaggaaaagtggtaacaattacacattacacaaaagtactgtaccattgcctttatcttgaaggtttcggaagcctctacagttaataagttaaataaagggcttgagtacataaatatttgtctaggaaccctaccgtatctacaacacagtaagaatctacgggaggacaaacttttaccataccacgctgagtgcaattgcgttataacatttcaaatatacaaagctctgttcttttttttttttttttaataacaatggtatgtacagaatcaataatcacagtttggtgacttcaacagtccatattctagcagagtattatttccctttggtttgatataaaaaccttggttggtgtatgataaagaagagaacaagaacaagacgcccctttcctttaagtgcactgttagctatcttacaggctcgcatttgcttcccgggccctggcttcacgctggggccctcgctggggagatcaacttcgagcgccaaaatgctatttaaaaaaaaaaaagaaagaaagaaagaaagaaaagaaaggctaagtggggtgtcaggaggaagaggttgggctttttaaattttttacttcaatatcaggcgtctgggggagaaaacctccccgatattttcaggaaagtaagaacaagagagagtggatgttggagttggagcgaggttggcagtagcaggggcaggggcaggggcgggtggacagccagccgaggaggtgccacgtcccggagcgccgagggctgccatgcccgcatccagactgctgtgaaggcggctgcgctctctcagtgccgtctcgggagtgtgctggtcctctgtttccatttggtcttgagtggtgctgagtgaggtgacctttcggggcgcgcgcggggcgcgggtgtggagggcagcctttagcacacctccttgcccgtgctggtgcccggcaggatgttgagctgcgtgagctgcgccgcgtgctccttggccttgagcctcagcgcggctatgctagaggcgcgtctgtctgcggccgc

SEQ ID NO: 2417 - DNA, 639 bp, Homo sapien
gggaacttgaggtttaaagcagggggaggagggccggaaatgctccccgccgcccccgacactcactcgccccaggccccatcctagcccagggtcagtgtcattcccttcaccttagcctctcactgcccaaagaggcttacttttcttctttaaactgctgttaaaatttgggaggaaacggaaagcaagggcacctgatggttcagtgcagcttcaggttagaggggcatttgaggtgcctgagctgggggagggccttccccctgagggactgggagaagggtaagccatgtgccctggaagcactgcagggagcctcagatttgcaccccctggctcacactcgctggcgccagccagcatggcagggatgggcggggctggttcttaggtttcctgctctttgggtgctagcacccagggtaaggagacacccatgtccggttgcaagacaaacccttctacctcctttcctgccaaaggccaccagcatcctctgcctcaatctcaatctttggacctttttagctccaaagtggtttgatgaccacaggctaaaattcatagtcttaaaattttagatagttaagagacagatctgttacaggttttcaaataaactggtctatctagtgt

SEQ ID NO: 2418 - protein, 127 aa, Homo sapien [sequence omitted]

SEQ ID NO: 2419 - DNA, 790 bp, Homo sapien
  Unsure 732: Unknown base
cactgcactttcaataaggcattttaggatttctaagttatgtatggtaaacagctggatgaaaaattcaattgcattgtttttccaaacttacagatgattggtataaagaaggttaagtctttagataagtaatgaaaatgtttgctttacacaaagtagagactatacaatgttttatctcaagatgtattgatgtactgaaaaaatgcattttaaattttttccagaaaactactgagttacaaaaaatgggtcatcgtcccactttgttacacagtggaaatgataaatctaggtaggattttatgcctgaaagagaatcttaaaatgtgtcagtacatttttgtttcagatttagaactcaggttcttggagactatgaaatgtgtccagagtcacagagcaagaaagtggcatagctaggactacaaaacaactttttcaaaatcctgagactctcccaatagtttatgaacatgtatttatgtattacatatttattattgaacatgtatttctgtgtcttgcagtcactggttttgaaacagaattaagggatgaataggatataatgtctgctctcaaggaacccagtttcaatttctatgtcttttgacacagtgcctagtggtaagatcaggagaataccatgagtatcatgtgccttcagttcaccaagacatgtaagaaaaaaaaaattaattatagtcacatgacccagatgtaganatatgaggtcaaggagggctggattatgtagctcattaccattatcattaatgtgtat

SEQ ID NO: 2420 - protein, 32 aa, Homo sapien
TALSIRHFRISKLCMVNSWMKNSIALFFQTYR

SEQ ID NO: 2421 - DNA, 571 bp, Homo sapien
  Unsure 413-443: Unknown base
atcttaatcctcacaatagtgccctaaggaaggtattagtatccccattttacaaaggaggaaacggggaacctggggagattaagcgaaggcctcacagatcatgaatagaagaggctggaaacctagtctggttcaagggtgtgctctttctgctctgccatgctgtgcttcagcccttccccactctcagccccatgtgcacgcagatagggattttcactctttgccctgtatgaaaggagggaaggtaagacacatgagcctagggggaaggtccatctgcaggactaccctgaaggggatgggacattcctggccctcagcctacaaactctttccttttatttcctgctggtgaaaagcataatttaaagatgactttgttttatacatacacatacatactcatnnnnnnnnnnnnnnnnnnnnnnnnnnnnnnncaagatagagggctctctgtaaataaatagacctgtcacctatcaaagatgctaaccaaggacttaccaaatgtcctttgatgctaagtatctttcagaaaagttattactcaacctgagtcacggac

SEQ ID NO: 2422 - protein, 85 aa, Homo sapien
MNRRGWKPSLVQGCALSALPCCASALPHSQPHVHADRDFHSLPCMKGGKVRHMSLGGRSICRTTLKGMGHSWPSAYKLFPFISCW

SEQ ID NO: 2423 - DNA, 670 bp, Homo sapien
ggcgtgagccaccatgcccagcctgtctgctgttgcttcagctcagaaagtcctggcagaactggtccacagggagacacaagggccacccagaccaggggtggaggcttgaactttggcaagccacagtcctggctccagactatgctgtcttgctccttggagcactcatgtgctcgaacttggcccaaggagtactaaagcctccctgcgccttgcaggcagttcagtcaccatggagaccctgtgtattctcaacccaatatgcctgatactgattgccaccagagctgagcccatctaggctcaggagcttcaaatgatggccttggcccagaccatcagtgtctcgcttatatcaacttttgggttctcaactggaaataagcaaagcctgcagatgactccagcagtaactcaccggaagcctcctttcagccgaggttgacatccactgttggctttataaccttcctactgatcataaaccaaatgtgatggggagctaggactccttcacctctcttccctttagtagtagagatgagccttggtggaagccatttgagggtttatttagtcatttcctccatcgctgtggggaccagagtcctggcgggaagaggagggccagctctgggaatctgttgagaggcagcttttccattgt

SEQ ID NO: 2424 - protein, 89 aa, Homo sapien
REPPCPACLLLLQLRKSWQNWSTGRHKGHPDQGWRLELWQATVLAPDYAVLLLGALMCSNLAQGVLKPPCALQAVQSPWRPCVFSTQYA

SEQ ID NO: 2425 - DNA, 722 bp, Homo sapien
  Unsure 58: Unknown base
  Unsure 116: Unknown base
  Unsure 118: Unknown base
  Unsure 124-125: Unknown base
  Unsure 129: Unknown base
  Unsure 131: Unknown base
  Unsure 136: Unknown base
  Unsure 139: Unknown base
  Unsure 141: Unknown base
  Unsure 144: Unknown base
  Unsure 150: Unknown base
  Unsure 165: Unknown base
ctctgcgccccgtcctcctttccggccgctctctctcctctctcccttctcaccactngatgggtggggggtgatgctggcgggggctgtaaccccgcccgccgtgtgtgtccgangnggggtnnggtnangtaangtngngtnggaggnatcgcacggcgcggnctctgggacgctggagttcaagcctctcccagaggccgcctgggggcaggcctcgcctcgggagcccgggtccttctccagagctgctccggctctcctcggccccgctctccttcccctacttggcctccccttggtgtgttcacttggaagcgcccgagcctcggaggcacccactgttctcgggacgcggcgtaggcagctccaactactttgagcccgtcttgtctgaagcctgcaagtttgtctcccttctggagtgacatggtcggcgaccaagcgcgggaccccaggctgtgcgcgctgtgcctgcgccctgcgttagaggctcggtgtctggtgtgttacaggcttcttaccgtgtcctgctgaggggcgtgaagttcctcactgtaccgcgcccagctgctacgaggagagaccgagatcacgggcgaggcgggtgtccctggagggggatctctctctaagcgctgctcggcaacacaacccctccgcccccccatccttctcactccgggggaaaaagcacttgctttccccaggcaaatttcggg

SEQ ID NO: 2426 - protein, 126 aa, Homo sapien
  unsure 39: unknown amino acid
  unsure 42: unknown amino acid
  unsure 43: unknown amino acid
  unsure 44: unknown amino acid
  unsure 45: unknown amino acid
  unsure 47: unknown amino acid
  unsure 48: unknown amino acid
  unsure 50: unknown amino acid
  unsure 55: unknown amino acid
SAPRPPFRPLSLLSPFSPLDGWGVMLAGAVTPPAVCVRXGVXXXXVXXEXSHGAXSGTLEFKPLPEAAWGQASPREPGSFSRAAPALLGPALLPLLGLPLVCSLGSARASEAPTVLGTRRRQLQLL

SEQ ID NO: 2427 - DNA, 527 bp, Homo sapien
ttaagggtacacagtgtacctaacataatatagggttatgagcaatctcacatatagctaatacagtgtaacttccagaggacaatttcacacaatgtatttattgaagcttccaaaatgttcacacacttttacacagatgctagcagtgtatactaaatgccagacaccaaactaggcccttcaaccacaaagggttgcttaattaaatttacagtttgttgaatctcatgttttgtattacagactaagtatctattaaaaatacagcagaaacacaatttattgactcgcaaaagatgctgtgtaagttccaaaagcaaagaaaaaatataagcgaaaacgattcaacttttttgtaagcatatactataagcaaaaatacacagaaaaaaacctggatgaacctgaataagattatgaatgatttttgtcttatatttatttacttgtctgtattttcaagttgttaaaataaatattaattacaaaataaaaaggttttttacacaaaaacatttaaaatc

SEQ ID NO: 2428 - DNA, 788 bp, Homo sapien
  Unsure 707: Unknown base
  Unsure 735: Unknown base
  Unsure 743: Unknown base
  Unsure 748: Unknown base
ggcacgaggagacatcacatgcccccagtctgatgcaccacggagtcgtctctgatgtattcttgtcaaaaaatgtttgcctgattctaatcatgaaagaacaattagaaaaaatccaaattgacagatattctgcagaataaatggcctgacctcatcaaaaacatcaatgtcatgaaaaacacaaaacattgcagatagcgtgaaattaaagattacagagatataatttaatgcaagatctctgactggatcctagactgcaggaaaaagtctgctataaagaacatttggatcacttgtagtagctgggaaataaaacaaaacattatttgtaaaaggggggaaatctgaacatgggtcttgcagtatttatgacagtttttgcggggcagagatttctagattgacagctgttttagtactttcaaggtgatgctctgtctgctggtttgcattgtttctgtctgagttaagagactggcagaacacagagttgcagtagccaaacactggagaaagctgggccctacagaaacctaacgctgaagaaacctcaggagccaaactggtggagaaaacaaagagtcctccctctctcccttttcaaataatgatcatacatcttcaagctgtctgaaatggttaaggagttcagtctgtcgtcaggcacacccccagagccagcctagcccacacagaccccntcagagccaaaccagcaaggagaatttnatttcatnttccnccttgaaaggacttctaggtagggagggagaccctttaac

SEQ ID NO: 2429 - DNA, 2110 bp, Homo sapien
gccgctttgggggccgcggtctctccgcagctcgcgggtcacatggcccgcctgagcaaggggagccctgcgcctgagctgcgaggcgggaggaggtgaggctccggcgcacacccaaaccgcgctgcgcccgctccttccgggccccggagatggcgcctccaccgggatgagctagccagcctgggcaataccagaggcggccctcggcgcgcgcaggggaccgagctggtcgccccaaccgggtttgatttctgatgactctggcctgagttccaggatggttttttcttgggaccagacatgaacaaaagttgacctcatgagcacttcaacctctccagctgccatgctcctccggaggctgcggcgactgtcctggggcagcactgctgtccagctcttcatcctaacagtggtgacgtttggcctgctggcccccctggcctgtcaccgacttctacactcttacttctatctgcgccattggcatctgaaccaaatgagccaagagttcctgcagcaaagcttgaaagagggtgaggctgccctccactattttgaggagcttccctctgccaatggctcagtgcccattgtctggcaggccaccccccggccctggctggtgatcaccatcatcactgtggacaggcagcctggcttccactacgtcctgcaggttgtgtcccagttccaccggcttcttcagcaatgtggcccccagtgcgaggggcaccaactcttcctgtgcaacgtggagcgtagtgtgagccattttgatgccaagttgctctccaagtatgtccctgtggccaatcgctatgagggcactgaggatgattatggtgatgacccttcgaccaactcgtttgagaaagagaagcaggactatgtctattgcctggagtcatccctgcagacctacaacccagactacgtcctgatggtagaagacgatgctgtaccagaagagcagatcttcccagtcttggagcaccttctgcgggctcgcttctctgagccacatctcagagatgccctttatctcaagctgtatcaccccgagaggctccagcactacatcaatccagagcccatgcggatcctggaatgggttggtgtaggcatgttgctggggcccttactaacctggatatacatgaggtttgccagccgcccagggtttagctggcctgtaatgctcttcttctccctgtatagcatgggtctggtggagctggtgggtcggcactatttcctggaactgcggcggctgagtccttccctgtacagtgtggttcctgcctctcagtgttgcaccccagccatgctcttcccggcacctgcggcccgccggaccctcacctacctgtcccaagtgtactgccacaagggctttggcaaggacatggcactgtactcgctgttgagggccaagggagagagggcctatgtagtggagccgaacctcgtgaaacacatcgggctcttctccagtctccggtacaactttcatcccagtctcctctagggtgccaagagatgcctttctgaagttggccacttcttgaagattcaaatatttatctctttatttagacatggttgcctgcaggtatttcactgtttactgttgttagagatataggcactggggcagctgaggaacctcaatatgttaagagccttggctttggtagcctcctggcaggagcagcagtttgccacaggtccggacctctccctccacacagccacactgcctcatgcagtctgacccacccagtgagggtgcatttgaacactgattatattctccatttgtttttaagctctgctttgtgttagagcttgtgactgccaaaaattttgtgcacagtgatatgactgttttaggatcttaagggtagaattttgtgaaaggtgagatcctttggaattgagttctttctcattgggtatgaaaatggatgtatgtttagaatatatgcccaacgaggcaggaccatgtggatagattccatttgtttccttgacctgatgtaataaaaactgataaaagccgtgcagtgcccggcatcttggaaaaaaaaaaaaaaaaaaaaaa

SEQ ID NO: 2430 - protein, 403 aa, Homo sapien
MSTSTSPAAMLLRRLRRLSWGSTAVQLFILTVVTFGLLAPLACHRLLHSYFYLRHWHLNQMSQEFLQQSLKEGEAALHYFEELPSANGSVPIVWQATPRPWLVITIITVDRQPGFHYVLQVVSQFHRLLQQCGPQCEGHQLFLCNVERSVSHFDAKLLSKYVPVANRYEGTEDDYGDDPSTNSFEKEKQDYVYCLESSLQTYNPDYVLMVEDDAVPEEQIFPVLEHLLRARFSEPHLRDALYLKLYHPERLQHYINPEPMRILEWVGVGMLLGPLLTWIYMRFASRPGFSWPVMLFFSLYSMGLVELVGRHYFLELRRLSPSLYSVVPASQCCTPAMLFPAPAARRTLTYLSQVYCHKGFGKDMALYSLLRAKGERAYVVEPNLVKHIGLFSSLRYNFHPSLL

SEQ ID NO: 2431 - DNA, 350 bp, Homo sapien
atggtataagattaaatatattagttatgaaaataattgtaaatggcttattgaacttatagtcagtaaaaatcatgtttttgaaaattatgtaatgactttggaaaataccagcaatataatgttaagtggggaaaaaagcaagttactcctctgtaatacatatgattttagttttgtaataaaaattcccaaccatatatgcacttatagggaaacaaaggacccatcgcaaatgttttccatgctgatctccaaagtggtgagtttatgtgtgatttttattttgtttatgctcttctgtattttccgaatttcatacaataaatatctgttacttttacaatatg

SEQ ID NO: 2432 - protein, 115 aa, Homo sapien
WYKIKYISYENNCKWLIELIVSKNHVFENYVMTLENTSNIMLSGEKSKLLLCNTYDFSFVIKIPNHICTYRETKDPSQMFSMLISKVVSLCVIFILFMLFCIFRISYNKYLLLLQ

SEQ ID NO: 2433 - DNA, 899 bp, Homo sapien
cagttttgccatgaagctctggttcttggagtctggcatgcgacaggccatttctaagctgtgtcctgctatgaggatttgattgcctccagctgcagttataactttatgccgctttaatattacaaatagttaaatttatttatagatgcgattaagggaaatgaagcttgatacagctctatatccaataacccctttaaaaagcaattatatataaaccaactaagtattatactattgaaggaatattatgtggtatgaaagacaagatttgaagaaatagaagtgagcctggtggcatgtgatactttttcattaaccacgtaccgattacaagtctggttaacatatttgtctatagcctggcaaggaggcaaagacatggattcttctctatcaccttctaataaaggtatcagtaactcaggggatggcccgtggggctcatcgaaacaggtccaccattgctctcagagttggttcctgttcctgtaggcttccatgacagtgattctctttacccaactcaccgcacccatggcagtgattctctttacccaactcaccgcacccatgacagtgattctctttacccaactcaccgcacccatggcagtgattctctttacccaactcaccgcacccatggcagtgattctctttacccaactcaccgcacccatggcagtgattctctttacccaactcaccgcacccatggcagtgattctctttacccaactcaccgcacccatggcagtgatgatagtgacgatggtgacagtggcattgatggtttgatggtggtgatggtgtgatgatggtggtggtgtgatggtgatggctggtaatgatggtgatgatcgttggtgatggtggtgatgatggggataata

SEQ ID NO: 2434 - protein, 99 aa, Homo sapien
MTVILFTQLTAPMAVILFTQLTAPMTVILFTQLTAPMAVILFTQLTAPMAVILFTQLTAPMAVILFTQLTAPMAVILFTQLTAPMAVMIVTMVTVALMV

SEQ ID NO: 2435 - DNA, 464 bp, Homo sapien
aagcaaaatcaatcacgttattttcagctccgttcgacacaggaaaaggaaaagaatgcacatgccaaacaagaagaaatttggtaagaaaagattcaagatatggcctttatacactaattattcttaataatttcataagtccttctgtcttacctaatttcatttgtttaacagtaagactatatatacattcatacaagaatcaaactatgctagcagataagaccgaaagacttcttcagggctcctgaccaaaaaagtgtagcatccgaccaaaatttcaagagaatatactaggctttcttcaccatagaccatccacattctgaatacctgtgacttcattccgtaaagcatctcccaaatgcagataatgtattcaaattactacaaatccaattttaactctacatacaaataaaatatctcaagagatagctgatgtacttcatagtataaac

SEQ ID NO: 2436 - protein, 83 aa, Homo sapien [sequence omitted]

SEQ ID NO: 2437 - DNA, 501 bp, Homo sapien
tctgtactctgtgatctcttttccttcatccttgcagaaggctggaagcttgcttctggagaaggctatgcacactgggaatacagttgaaaaccagggtaccacactcaaacgagtgttactattatgtaagatcaccagtcttcttccctcacccagctttcagaattctggccagaatagaagtgtcttatctaacctgaccagctcaaggtaaaagacctcaagaatcggacattggctgtgtctgtgtctccaaagaaaatgtcccagtcagctcaccctactgtgaaacccatattgaatccagaacttctatttagtttgtgtcctttttttctcataaacaaatttgttatagtcttactaagatataattggcatagaataaactttacacttaaagtgaaaaacttgagttctgaggcatgtatatatttccacagtcgccaccacagtcaggtaatcattcccctaaattttttgtgcctccttatcttc

SEQ ID NO: 2438 - protein, 166 aa, Homo sapien [sequence omitted]

SEQ ID NO: 2439 - DNA, 737 bp, Homo sapien
atgttggtgaagatggtacttatcttggtgcccaatccggtccctgcaccgacaatgacaagggcaaccagcgccacaataatggcgtattcaatacctgaggcaccctcgctgcgtttgaagaacagttgcgtctgcacgtaaagcttcactatcaggtcaaggaacatatgacttctccctaaagcgccacggattgccggtacggctctagcacgatctacgcggcgtgccactagagcattgtcaacaaaccctgggctcacaactgtaataacgagttaatcacaaagtattagtcgcaaagttggcgtcataaaaccaagcgttcaaggaggcggatctttagttccggtaaattttttgtcagataatggcatttcgtcctagctgagctaccttcaaatagccaaatcgttagatgttcatcacagccaggttgcgaattaactcgtttggattggcgggactgtagtgcaaccggaaagggagagccgtcatgaacagtcgtatcagcatgatcctggctggcgtgctgttggtcggggcgttgatcgcggggtattgggggctggtgctgagccgcaacccgcccccgtcgccgaacctgtcatttctgctgaaaaaaccgcgctgacgccgaagaccagacccgctcccggtcgtggtgctggtgcgcgatgtgccgctttcgtggcgctgacgaaacgactggcggggaaaagctgggcacggtg

SEQ ID NO: 2440 - protein, 47 aa, Homo sapien
MLVKMVLILVPNPVPAPTMTRATSATIMAYSIPEAPSLRLKNSCVCT

SEQ ID NO: 2441 - DNA, 310 bp, Homo sapien
cctgattagttgtgatgaatcagcccttaacctatttccatggtttgtggagattggttcattcctgagtacaataggatggtgggatttttgctttaatgttcattttaaacagaattctagacgcagatctaacattcaaactgaattatgttttctgttaaaagacggtgaaatgtcttggatatatcctcaggatatgtcagtgctttctcataaaataatgtaagcaatagcatttcttatttgtagagcattttgttctgggtggaatctgtgtggtggttctaggggctggacctagggaaat

SEQ ID NO: 2442 - protein, 75 aa, Homo sapien [sequence omitted]
